United States Patent Application Publication US 2026/0275333 A1 - sequence listing, part 22

SEQ ID NO: 3045 - RNA, 64444167 nt, Homo sapiens (residues 45,110,920-47,259,058 of 64,444,167)
  source 1..64444167: mol_type = mRNA
tttataatgactccaagcctcagttttctggctgtgaaatgggaagctgggctagtttgagactcagatggcacaaatgacaggggaaaatgaagcccaacatctccactgtggccaataaggccatgcctggtctgggccctgcccatctctctagccccatcctctactgccctcccactcagtgcctcctgatctgctccaagccagctctctctgcagggctcttgctcgggccgcatcctttgcctagtgcacttctcctgtactccatgcgcctggtcagctcattaggactcagcagaaacatcgcatcctcagaagaccctacttctctgaccccacattaactaggtcagcgcccccccaccccggcccccacacacacactcatttctttcctccagagtttgtgatgctgcatctgtttgtctgtgtctctcacttggctggaggtgaggagagtagacaccctgccagctttgctcaccgttggtccatatcacagcccttggcgcacagcagtagggctcagtgacttggaaagaaagggttttgaagtgaggcccagcattgcacgtgcgtcagcagtggccagcctggtgcactgtcacagccacagctggccacgtcttctgcaccgttgcgttcatcactgttgcaaatggcatggtttcgaggatcaggcgttaactctgtctctgaggcgttcctctgaatggtatagagtgtcctgtcccagagcttacctaacattcttcttgctgggattttgggccatgttcatatttcatgcacaaagctggaaatcagtatcctcctccatgtagaggaggaaatcaaggcctgaaaagggcagtgacttgtccagacccacatgggctgggcttaggactcccagggcccggctccctctgacctctgtgagtgtccaccctgagctgtctttgagctgtagggatggagcaggtcccaggtcttcaattcaatccagcatcagagaaaatgttcaagagttccgaggggcagctggatctggttctgtgactttacctctgtgtccgcccctccccctcagccccctgcctgggtgctggctgcacacataagtaggcaccttgctcacatcctacgtgcgctaagtcaacttcagctgtcacatcgggttggtttaaattaaattgctgccccctgctggagaaagagaggcttggcgtggggagggggaaaaagtgtgggtttggggtggtgggggtgatgggagggttcctgggaaactgtctgaggtccaaggtttagccctgaattcacaagtccaagtcaaaggtgcgcaggcctcaaagggtgggccaaacggagctgcgtgcactcaaagccggtggagccgggtgggtcaggcagggagagcttctgtggcgaggggcctggggctggccttggggaatggacagatagggatggggcatgacagctggcatttccagtggaagaactgcgatagctgcaatgtggaggtggggataaaagcctggcgtgtgcagagccggcgtgagaggctctgggtggtcacactcactctgtttgcctgcctttcctaacagtccctccaaaccaggttctccactcacagatgtgtacatcgagacagtcacacacacagatggtcatccagatgcatgcgccatgggtgtgtagacttagagagcaaaagaatcgtatccaaacatggttaaatatatacacttgtacacacagacgatacacacatagtcaaatacacaagcacatttagatctagacacacaattagctacaggcttaacagtaggaaactgcagatagtcaactgttttatctacaaaagtagcaattttacatggttcaacttaatacacacatatatacatatggacatatatcagagagttatatatatgcaatatatttataaacatatataaacaggcagtcatgtatgtacatatgagctggaacataatcactgtcatttacacatgcctacccacatagatacatacacacagatagacactcagacacacacagttatgtatataaatatataaatatatagcatatgtatgtgaacagagagacatacataagcatacacagtcatatatacagaatcatatgcacagagctacacagacacatatatcttcccaataccacataaccactgacagcatttaattaggcacttgctgtttatcagggactatgccaggctctttgtatcagagacacccagacgtttgagtgagaagggggcagaatggggagctcttataaacagaggcggctgggcttccacaggcaacaaactgagacttcccttcccttggcttcgtcaccttcctccattgtctgaaattctaccaacagctcggcaatgtcttacaggagagaaaccagtgggggacaaggtgtggtgaactgggggagagacaagcttgtcacacctgcccatgcagagtggccctgcgcaggctcggtttctgctgtgccagctctttgcctctgagcagctgggctgaatattggggtgtgctccctgggaacacaatgactcccccaaatcacccacttatgctgtgcttactgtgtgccaggcccttattcctcgagacaccatttactcctgagagagaggcatgggaccccattttacaaggagtaagtctccagacctgtcctgttgccttccaggagtgtcctgcctggaagtcctaataaactcatgcacttgccaatctggccttgtctaagtcattctttgttctctcagctccttcctatgttgggggtgcattgtcctgtacagtcctgggtttttgctgtaatagttggtaaagtgaatctttctgatttcaaatacttgcactcatgcacttgctaatctggccttgtctaagtcattctctggtctctcagctccttcctatgttgggggtgcattgtcctgtacagtcctgggtttttgctgtaatagttggtaaggtgaatctttctgatttcaaatacttgcattcaaatgccacatttggcactaactcagagtcagtctttgaccttgttaagtggttccccgctatgcctcaattttcctcatctgcaaaatggggatgaaaatagtcctgtcctcacagcaccttgtcgaggagttacgtgatgatggtgcatgaatcacagccaacacagggtccagccttggagctcaccagtgtacttccttcctcagcctgtccccattactgtcccctttctttaaggcagggcaagggttgcacaggtgaatgtaggttggagtgttccagccccagaaaaggacgcaggtggaggcctcacccagatcaggagtcacctgtctagccactcagcagccctccctcacctgtcagcaggccagccccagccttgtcaggggtgggaatggggacaggaggttgggggcgatgagagttagagacagagcttcctccccacaaagcccagatcccagaagccacaccctctcctcaattcccaagtcccttccacagatggggtggtggacccactgacccagtcacaccacagcccagcaggcacagacagggtccctccccacacctgaaggcacagagacacacatggacaggcaccaagctcagacacatgcgtgcagccattcctaagtgtacgtgtgcagacagagctttgcacagacaagcagacgcaaagacacatgtctacacagacacaggcacatgcattccccgccctgccaccccctgacatatagacaggcacagacaagcaccgagaaactggcagaaaagacacttacagataccaacacaggcaggtggacaggcacaaatgtacacacataaaaacacaggcttctgaaagcactaagaatcaggcatccacacatacacacacgcacgcacgcacacacacacgcgcacacacaccccacagggcattacctgccttcccccaaacccttactctccctagagaagtagagacaatctggtccccccagcagagggatttcccgcactcacctcccttcttcctgccaaagacagcaggcagctgactccccacagccaggagggcccccaggaggagaaggctctgggtcctcatatttctgctgccggctcagggcccagggccccccagattaacacctgcagcctcagggaagccagagaaacttagtcaggagaggaaagagagggggtgtggagtgacaccgtgcctgcttcatcttggccccaccccctgagggcccgaggactcagtgcaagggatgctgtcacaatagctgaagatagggtggcggcacatcctgcatgtgggggactcagatccagtcttgcctgtatcggtgacttgggctgtgatcttgggcaagtcttgtctctctgggcttcagttttttcatctgtacacagggtgaaggttgttgaggcagatgcttgctatcctggctctcaaagatgttgaagccccagcgatgtctaggcagcgggtagaggtcagctttgaatagcaaaggagtgggggtttgcagagttctggatgcctaggaagggagaaggcattagggttaggccagagcttgcagccaaagaaggctggcccaggctggcataatgagtgaggccagccctggcctctcctcttgggtcctgtggatgggagaaagaccaccccgcctttggtgagatcaccagtggcttctgatagaactgccctcttcctggggctggcttggctgttgagggtgggggagcatggcttttggcttggctaagtttgctggtcacagcagatgtgtggccactggaacctcttctctggccctaagggatcctgagcaaaaaaatgtcatctcatccagggacccccaccttagatttcgtatctctgatgttgcctcctgcatttggtagaagagagggagctgagacttggcatcctaagggacatcctaaacagaaactccatcgaagtacattctctcagccttctcatttgaaagacgaggaaactgtgagatagagatgagaggggactggcccaaggacacgcagctaattcctgactaagctgggacttcccactgtggcctccccatcaccctcattcagttcctgggttttaaaagcaggtcaatacctcatctgatcctgagaaaggagggtgatattacagggcttgtctcacttacccattccaatccaggacagccctggcagcaggaagttcttccttgggtttaatgtgaatctctcgtgctgtcttctaagctattaagataggagaggctctgtcttctatgatctgatgttgcttttggaatgctggcacctccttggaagctttattttggaggacaaatatatgagcccttccttcctccctccctccacccctccctccctccacccctccctccctctttctttcttttttcttttctttctttctttttctttttctttctttccttttttcatttctttcttctttctttccttctttcctctctttctttcctttctctttctttcttttctttctttcttctttctttttctttcttctttctttccttttttatttctttcttctttctttccttctttcctctctttctttcctttctccttctttctttctttctttctttctttctctccttctccttcttctttcctctctctctttctctttctctctctgtctttgacagaatgtcgctatgtcacccaggctggagtgcacagtgccatcatggctcactgaacccttgacctcatggacccaagtagtcctcctgcctcagcctcctgagtacctgggactataggcatgcgccccaatatttggctagtttttattttttgtagagatggggggtcttcctatgttgcctaggctggtctctaactctaggactcaagtgattctcccaccttggcctcccaaagtgctgggattccaggggtgagccactgtgctcagccatgaaatgctcttttttttttttttttttttttttttgagacggagtcttcctctgtcatccaggctggagtgcaatggggcaatctctgctcattgcaacctccgtctcctgggttctagcaattctctgcctcagcctcccaagtagctgggaccacaggcgcccgccaccatgcctggctaattttttgtatttttagtagagacggggtttcaccatgttggtcaggctggtcttaaactcctgaattcaggtgatccacccgcctcggcctcccaaagtgttgggattacaggcatgagccaccatgccaatgctttttaaattaaaattattttgtagacattttcctgtgctgtgaaatgttctctaaacatcatgttttctgatggctacatgctgttttgttagatctatatgtcaaaacatcacttcagtaaagtttttagggaaaaaagatatgccaaaatatacacaatcagtatcctattatgaaacatggaggtttccaattttccactttcataaataaagctgtgataaccatctttttgtgtacattttggagtcacatctctgactgttttcttaaagtaaatttgtcaaagttagaaatgctaggtcaaaaggcacagtcatgtttccaggcgttggatatatctggtcaaattaaatttcagaaaggaagtaagtgagtgtacaagagcctccacctgccctgccatagacctctattgtttcgtctgcccagcgtctcttcctttggtggaaccattgcctcctgactgctgtcattctggttggttgccaatcagcaggtacttctcctatcaaagctgagggcactggatccaggttacacccactgcactcttctccacccctaacttgcccacgccttcattagagtcttgaacagataagccagttctctaaacagaacagtccaaagctcagatgctgttgctcacagccaaagatccttagtggatattcttactacatacaggatattaaaaaaataagtaaataaaatctttgctaacggaaaacaatatttcattttaatttgtcttcctcttcctcttaatacccatgatggtgagcatttcttcatattcgcatactgactgtatcctttctctgtgaattgcctgtttttgtattttgctcatttttattgggggtccttttatttttgagttttaagagctgtttatatattaagaatctattaacctgtcatacacaaggggcagtagtgaacagatgtatattggagttaggcagacctagttttgaatcttggtgccataggctctatctgtttgacattaattttgtaaaacccctgtttatttttgtataccagtagagatagagataatcatatacgtgttataggatggttctgagaactgaatgagataaacttgataaatgctttgatgctatattgcaaatatttctttcctcatttttgcttagtaccaaaggattaaattttggggtaatcaattcaatcttttcattcatattttctccttttatttttatgctaaaaaggctttttgactctgatgttagataaatattcactatatttacttgttattattttgtgatttttgaaagacatgataattctttaatctagctgaagtttatcttggtatagagcgtgaaataggaaatatcttttttttgtaagtaattaagcaattgtcctatgatcatttagtgaataatttaaacttttgccattgattaagaattaaaactttatcaataacttaagtcttattgtaacaggggctgtttatgggttttcattttttttcttttccttttttttttttgagatggagtctcgctctgtcacccaggttggagtgcagtggcatgatcttgactcactgcaacctccacctctcgggttcaagcaattctcctgcctcagcctcctgagtagctgggattacaggcacatgccactacacccagctaatttttgtatttttagtagagacagggtttcaccatgttggtcaagctcctctcaatctcctgaccttgtgatctgcccgcttcagcctcacaaagtgctgggattacagacgtgagccaccgtgccttgcccgttcttttcttttgactgtttattcttatgccagcacagacaagcatgtattgtgggttcagttcctgaccactgaaataaagagaatattgcaataatatttggttagtttttattttttgtagagatgcggggggcgggggccttcctatgttgcccaggctggtctctaactcctggactcaagtgattctcccaccttggcctcccaaaatgctgggattaaagtgagccatgtggattttttggtttcccagtgtatctaaaagttatgtttgcactatagtgtagtctattaagtgcaaaatagcatttgtctaaaataagtatgtaccttaatttaaaaatactttattgctaaaatatgctaataatcatgtaagccttcagtgagtcatcatcatctttctgctggcggagggtcttaccttgatgttgaggctgctgaatgatcagggtagtggtttctgaaggataggttgactgtggcaattttaaaaaatcagacaactatgaagtttgctgcatccatggactcttcctttttttcaactttcattttagaattagggggtacatgtgcaggtgtgatacaaaggtatattgtgaaagatttctctgtcacatattgtgaaatactatcaaacatgcaatgctgtttgataatattttatacactgtacatcctctttcaaaatcagagtcatggcatggtgcagtggctcatgcctataatcccagagctttgggaagccaaggcaggagtatcacttgagcccaagagtttgagaccagcctgggcaatacagtgaggctctacctttacaaaaaattaaaaaattagctggatggtggtgcatgcctatatcctaccccctcggaaggctgaggtaagaggattgtttgagctcaagagttcaaggttacagtaagctgtgatcatgccactgcactccagtctgggcaacagagcaagaccctgtctctgaaaacaacaacaacaacaaacagttggaatcaattctctcaaaccctgctgtgttatcgactaagtttacataatactttaaattcttggttttgtcatttcagcaatgttcacagcatctttactaggggtagattctatctctcaaaactactttctttgcccatccgtaagaggcaacacctcatccattcaagttttatcataagattgtagcaattcagtcacatcttcaggctccactttaattctagttcttttgctatttccaccacatctgcagtgacgacttcctcaactgaagtcttgaacccctcaaagtcattcatgagggttgaaatcaacttcttccatactcctattcatgttgatattttgacctactcccatgaatcatgaatgttcttaatagcagttagactgtgagccctttccagaaggttttcagtttactttgcccagatccatcagaagaatcaccatctgtggcagctatgagatgtatttcttaaataatgtatagccttatgagatgtatttcttaaataataaaacttgaaagttaaaactactccttgatttgcagaatagatgttgtgttagcaggcatgaaaatattaattgtcttgtacatctctgtcagagctcttgggctatcaaatgcattgtcaataagtagaaatattacaaaaggaaagtagaaattgtttttttttgtgagcagtaggtcttaacggtgggcttaaaatattcagtaaactatgccgtaaatggatgtgctgtcatccaggctgtgttgttccacttatagagcacaggcagaatagatttagcataattcctaaaggctctaggatttttggaatagtaaatgagcattggctttaacttaaagtcaccaaatacactagtccctaataagagagtcagcctgtcctttgaagctttgaagccaagcattgacttctctctagctatgaaattcctaaatggcctcttctttcgataaaagactgtttcatctacattgaaaatctgttgtgtagcgtagccaccttcctcaattatcttgtgtagatcttctggagaacttgctgcagcttctccatcagcacttgctgctttactttacacttttatgttatggagatggcttctttccttaaatcttgtgaaccgacctctgctatcttcaaacttttcttacgcagcttcctcacctctcagctttcatagaattgaaaaaagttagggccttgctctggattaggctttggctaaggggatgctgtggctgttttgatttttttatccaaaccactaacattttctccatattaacaataagtctgtttcacttaccatttgtgtgtttgctggagtagctgttttaattgccttcaataacttttcctttgcattcataacttggctaactggtaaaagaggcctagctttggacctttcttggttttcaaacatgccttcctcactaaggttaatcatttctagctttttttgatttaaagtgagagacatgactcttcttttcacttaaacacttaaaggccactgtaagatgattaattggcctcatttcagcattgttgtgttccaagggagagaaacagagaatggccggttgggggagaaatcagaacatatgtgacatttatcgatcaaattcactgtcttatgtgggcacagtttatggcaccctgagacaattaggaaagtatcatcaaagatcactgatcacagaccaacataacagatgtaatgataatgaaaaaaattgaaatattgtgaatattaccaaaatgtgacacaaagacacatagtgagcacatgctataggaaacatgcagccaatgtacttgcttggtgcagggttgccacaaaccttcaatttgtaaaaaatgcaatgactgcaaagcacaataaaacaaggtatgcttgtattgtggctgtaattgttgtagctccataatatgttttagtgactggtggtatccattacccttcattagtctacattttcaattttccaggttacaagtattttattgttccatgtgaacctaatgatcattttgttaagttgcaaaaacaaacccttgtttttatcataaaatgttttcaaaaatgcacaaaagaacagcaaatacttttatggagcctacatacccatcatccagattcaacaatgaaccattttacaagaattccttcatgcatatccccaccccttttttggctgaagtattttaaagtaaatccaaccgatcttatactttacctttaaatacttcagtgtgcatctctaaaaactaaggacactttctcacataatgacaatcctactgttacacctaagaaaattaactgcagtttcttaacatcatctaatattctatttgcatcttgtttttcttattgtctcaaaagtgactctatggttgttggtgcacatattgcattggctgtaatgtatctgaagtttcttttaatctagaacaatctctccaactcttttttattctcctttcctccctccttcttcttcttcatgctattgacttgttgaacaaaacagacaaattgttctttagaatgtcccatgttgcttccctgtgatgtctttcatcttctttgtccttcacatttcccatagatgaatgctagctgtagaggcttggtgaggttcatgctcaactgtcttggcaggagcccttcttgaatgatgctgtgtgttttgtgttgcatcacctcaggaggaacggaggtccgctttacccatttttagcattgtggagacagattaatgtgttttcggtgtgtacctgaatcctcaagttgtaaacttgtgttttccctcttacaaactgtaaatataccacagggtgatgaaatggcaccctgtaaatattcagaagccatggataatcattgccagaatcaattatttcattagggtttgcaaaacccagtgggttttaattttaattatatttcaggtataaattatgctgaccaaggtgaacactttgaggaggcttcctgcttggggaagagcatatcttttaaaaaacatttatttatttattctgtagaaaagtttagtctatttatccagatcttttaaaatgtcatttaataaagttttagggtttcctttcagaaaatttctgtacatctctagatttatttgtaggtattttatattttattcactttgataatgttgaataggattttttttttttactattaggttgtcttagcaggtttgggctgctataacaaattaccatagactgggtggattataaacagcaaatatttatttcttacagttctagaggctgggaagtccaagatcaaggcaccagcagattcagcatctggtgaggaccagtttctcttctctgacagtgccttctagctgtgatcacacattgcagaagggcaaggcagctctttggggtctcttataagggcactggtttcattcatgaggggtccattcatgagcattagggaggagcaccaggtagagagggaaagtaccgtccctggggtctggactttttgtgactcttccctctttttggggaaaaggacttcaagctcaggttttctttggtggggttgggtattgcttcttccatattccaagtctcaggaccctcaggggcaggtgccaagtgagagtgacccccagaggtagaaaggacccagcatcatttctgaggacacctggtagaggaggagcctggacacttggcctcccatcctggctcagggtatggccttgacacatcttcatccttgtttcctcctttggacaatggagatgttcagactaggtggtctctgagggccctgccagctttagccatccctccccacaccagctaaagggactaattcctccgaactttcatgggtcagatagaggcagggaagggacagccccagccctgggaggcaggtctccttaccttcttccagttccttcacaggaatcacacacttgaagccacagtgcaggtaacaacacttcctttcccccagacagtcctggtctgtgtgacactggggaggatcggacttgaagcagcgtacgttgtcagctgggcaaacccctgctttctctatacctagtggaggaagccacaaggtgatatgagaactccagccccagagggcccctcaggacctctccccagcccagccccacccagctccaccatgtctgctcaccctctttaactccttccacagccaccagggtcacaagaacgagagacaccatgaggaccaagaagctgctggaccccatgttgccaggcaggtgcttggctgggagctgggctgagcctggctttatagtgttcctgctgggcatgccagtgggtggagctgaaggctcaaaatggcaagggaggctgcacttcccagctctatttggaaatggccccttctgaggagggacttggggctttccctaaggctctgcactggaatagatgaagaaatccaagagcgaccctcgttcttcacacgaggagaagaaatggacacgtgattgaccattaggcgccaccagggccaaactatcttatggaaggaggaaaagaagcacagaaagggcatgaaattactcaagttcacacacgaggcagtggcagggccagacttcctcaactccaccgtgttctctatcagtccctcttcatgcctgattcacctgggaccaaaatcttccctccttcctgtgctgccccggacttgttctcagttctcacctcaccccaaggaagaatctgaatggcagtgcttaaaatgtctgtcctgaacattcactctcagccttgcgctccagcaccgtgtgctcctgccccccgccaatctcatgtggcctggaggaaagcagattttggacctgtcaccagctgtgtgactttgaaagcagcttcacctttctaagcctccgtttcctcattcatacaatgagcataataattatactgtatcatcttcataggatttgttttccctcctctgcccctgcatcccccaaattcctggatttggaagaagacatggacgtgtgtgcgtgtgtgtgtgtgtgtgtgtgtgtgtgtgtgtgtgaccaggcttttggggtcctttctttgaatgagtactaaagggaggaaaatccttcctgttggaaaagttgcagatataagcccagaaactccagaaatttggtcctggccctggtgagagagaaattctgagaagataaatctaagatgctgataaaaagagatgagagatggacagggagtaatttagaggatatctagtccttcactaaactttttcctgagatcagccccactcatacccagggttatgttaccacccaatacattcacctttctgcctaagctggtctgaattggatttctgtcatttactaacaggacccctgagtaatgcaaagatttgggtttggggtgttccacatcctgaagtgtggaagggactgagttggggttaagtggaggcagggaggatacctccattcctggaagtgagcctactccttattaggtggtgaatctttggttacaatctcaccagtcatatcactggactcagatcatttggataccagggatggaatctgggaagttcataaacaaatactagaatgttggaatgtattggctatttcctcctccacctttttattatgaactttttaaacatacagaaaaattgaaataacagaacaatgatacttgtatacctacaactggatttaacaattattaatagtttgggatattttagaatacctatagctacatttgttgaaatatttgaaatgaaattgaatacattatgttcctatttcctaaatacatcagcatgcaaattctaagaataaggatattcttcaatataatcacaaagccattatcatatctaagataattaatagtttctgcatgtcatctcatagccagttcatatttgtttctccggttctccccaaaatgtcatttgtaattgactgttgatgatacttctttaaaaaaagtattgtaaaataaatcctacatatgaaagaatgtaatcaacattctataccttttgaaaaagaataataaacacctatgaacctatcaatttagaataggacattaccatccctacttcagaggtaaccactatcttgaactttctgttaatcatcctcatgttttcctttaaagttttgctctcttgctatggcttgcttagtgatacgtgttgtttaatttcgtgtaagcgtaattatggcctaagtattcttttgtattttgcatgctttgctcaacaccgtgtttttttaaaaaattgtggtaagaaatatatactataagacatgacctcttaacatatttttaagtgcatactaacagtattgttaattgtgggcacagtgtcatacagtaggtctctagaactttttcatcttgcatgactgaaacccactgaatagcaactccctattccccccacccccagacccttggaaccaccattctgttttctgcttctataagtgactactttagacacttcataaaagtggaattatgccatatttgtccttttgtgactggcttattttgcttagcataatgtccttgaggttcacccatgttgtagcatgagatagacttttcttcttttttatggctgaataatattccatggtatgcatatatatgtacatgtatataatctttttccttccctcatttatctgtcaatgggtcaatgcacatttaggtttccatttcttggctattgtgaatattgcagcaatgaacttgcaggtgcaaatatctctttgggatcctgatttaaattcttttggataaatacccagaagggggattgctggatcatgtgatagctctatttttaattttttgaagaacttccatactgttttccgtagtggctatactcctttaaattctcactgacagtgcacaagggttccaaattctccacattctcaccggtacttgttttctttttcttttctttttaaaataaaagccatcctaacaggtatgaggtgatcttatggtttgattttcattttcctgatgattagacatgttgagtatcttttcacatacctgttggccatttgtatatcttctttggagaaatgtctgtttaagtcttattcacttttaattgggtctttatatttatatgtgtgtgtatatatatatatatatgcatatgtacacacacatatatataatgaaaaagaaaagaaataagtattagaatgggagacgagaaaagccattgtttgcaaatgatgcaataataaaaacacaaaagaaactacagatacatcatgagttagacaatttttcaagattagctgacacaaaaatcaatatataaaagtcagctgctttctatacactagaaatattggttagaaaaatgtaatacgttaaaagcaataacatgtaaaatatttagtaataaaggcaacctgtgagatgggaaaaatatttgcaaactacctaccagataaggggttaattttcaaaatatataaagaactgcaactcaatagcaaaaatatgtttacatatatatatacatatatacatagcaaaaatatgtttatatatgtatatatataaatacatttaggcttacatttaggtttcctagaaacctagactgtctaggaagcaagccccataaggaacttctcatattcatattataagaaggtaaaattgcaggggacaatgttcctgttttgtagtagtaaactaccttctcaaaaggtggttattttgtccccaggggactttggcaatgtctggagacatatttgattgtcacaactgggacagatgtgcttctcacatccagtgtctagaggctgaggttgctgctaaatatctaacaatgcacaagacagcttttcacaacaaacaatgatctgtctccaagtgccaatagtattgatgttgagaaacgctgctgtcctgcctcactgactaatagctgtgcatggcctcagaacacctcaatgtaggctgaagcgagtaatgatgggagtgtctgctgggagtatcccatgcttaggagtgctgatccttggctcactggtttcacccagtaaaggcattccttagcccatgccatgtgaccttgtggaattcatcccatgttctgctgaatcaggttaataaagttcccttttaattctagttagctaagagtttttctcatgaaaggatgttgaatttttatcaaatgccttttcttcatcaattgaaataaatatatggattgtctcttcaatctgttattttgtgaattacattaaccagatttcacattcattgtcttttttgggcatcatttatttatgtgcttcaagaaagtggaaagccttgaaccaaaatggcggagtctaagacagggaatgaaagggaagatatatttctcataaacgtggaatatatattcctgaaaatcattaggttacagagttttgctcactacaaataatagggcttctggaaaaaatagagttgaagtagaacattcaatatttgtgcagtctcataagtaatacatcaaacaaacagaacccacacccaataaaaacatgaccacagtgttaaacatcttcagttcctaataaagaaattatgtagtaaatgtagcactttactttgacaaaagatggggagtttgcttggtaagtgggtatggtgaaatactgtggcttttgaggtatgtacaaaaggtggaatgaaggacatcatcattcttgggactaaatgttgttatactggagggtcattgtcgtcaatcttttacttctgtactggcttaaaacagcaatccgcttcgttgatttgccagttcctcccttttgtaaggaagctgtataactctaaatgaaactggataactgcaaagttctatgctgatgctcttgacattaaaatcttgatctttggctgggcgtggtggctcacgcctgtactcccagaactttgggaggccaagccgggcggatcacttgaggtcaggagttcaagacaagccagccaacatggtgaa[133 bp omitted]accactgcactccagcctggacaacagagcgagactttgtctcaaaaaaacaaaaaacaaaacaaaacaaaaaaacttgacctttaatccactacaattgtttatcaatatcacttgaagctgatagtaactgatgtgttaggctcactagcggtctcatctctgacggagtgcaacatttagcttattgctgtggtgaatagcatatgctctcatttattcaaaaatattttattatttcaaacttctcagtatttaagacatttcttttatttatttatttttacatttttattaatttatttttttagatggagtctccctttgtcacccaggctggagtgcagtggtgcaatctctgctcactgcaacctctgcttcctgggttcaagagattctcctgcctcaagctcccaagtagctggggctacaagctggctaacttttgtatttttagtagagatggggtttcaccatcttggctagtctgctctcaaactcctgatctcaggtgatccacccccgtcagcctcccaaagtgctgggaatacaggcatgagccacaatgcctggccttcaggcatttcttttaaaatcatgtttcagattcttgtttccaggacattgaacacagtattaaatacttctatcaagaagaggatagaactcaggataacagcacatcacgcacttggtagggcaatgactataggtaaactgagataagagggaggagatgaagtgtttgttattttgtgtgtcactcaagagataccatgttcaatatttttgcattcgatttgttttatatgacaggacaaggcatagtcaccttatgaaaaactgtattaacccaattttacatgttagtgatttaattccttatttatctaccatgtatgaacatattctgcttgttaaagcacttgcttcagcaggagagactcgtgggtgtgtgtgtgtgtgtgtgtgtctgtgtgtgtgtatatctttatattaatgagaggtgacatcacagtaatctttgccttgacagtgtgcctgactgaatagtataagctgaattaatgcccttgttagaaattgtgggatcccaaaatatttaatgcctaaaaatcaggaaatgatcatctgaaccccttctccaccttccactgagccagacaaaggtgcaaatgcttccttaaaggaagatcaaccaggaagaagttatgcctattctttagctactttttccctagttttaaagatatgaaattctatttaaagtattatcacaataatatatgtacacagtataaaatgtaaagtgtaaaaccaggtttacaatgggaatctcctacattgctcctatttaccttgattcctgatacccagaggtcctgataccagaggtaaacacttttagctcttctagctgtttctaatatttatctccatgtttctaaataacattctgatgtattattaatgttcttacatttgtattctaaattgtgtattatataattttcttaaatttctgaaaaatttaaatttggatttaaaaaaattattttcttgtggtaagaacacttagcatgagatctaccctcgtaacacctttttaagtgtgtagtaccatattaactctaggcactatgttgtacagcagatctctagaactttttcatcttgcataactgaaactttacccactgaacaacaatcccccatttcccccttcctgaaacccttggaaaccaccatcatactttttgcttaaataagtttgactactttagacaactcacgtaagattataaaagtggaactgtgaaatagttgtccttctgtgactggcttattttgcttagcatagtgtcttcaaggttcatccacgttgtagcataatgaaaagatttccctcttttttggctattcaaattccatgatatgtaaataccacattttctttaccgcattcacctgtcaataaacttttagtttgtttccacctcctggccattgtgaataatactgcagtaaacatgggagtgatcaaggatgttggtaaacatcccagaacgtaccagacagcctcccacaacaaaaaaattgtccatccccaatgtcaatagtgccaaggttgggactctctgtcctaatccaagctattgcagtatttcttatctgggtcacagaaataacttgataactcgtcttcccactgacaaaccacacattctccagaatgatcacataaaacacatattagttcttgagtgtttgctgtttgactttatcatattctattccatctcaaggcttctgtaaatacaggtccctttgctggaacatgtcttcttcttcacctcttgctctttgaccacaacttggctaagtttttcatattcttcaagtctcagcttccatgatgctacatcaaagaagtctttttcaccctcccttttaatttttctcagagcagatagttttatgcatagtttatttatatttgtactcaaatttgccacagtttgtaatgacgtatgtatctgtgattttctttagtcgagagaaaattgtcaaaattattttccatcactcctgataccttaatgtgtatttccctcaaagatatcctctgttgtgaccacaatacaaccatgaacatcaggaaattaacactgatacattcttgtcctctaatagccccaactcaagttttaccatcataatgagaatacttaaaatctactatcttagcagttttcaaaagtacacaatattgttattaaccatattcatcatgctgtacaattgatatcttgaatttattcttcctatctaactgaaattttgtattctttgaccaacatctccccacactccccttccccccagcccctgctaatcacaatctattctcttcttttatgagttcaactttttagattccacatataagtgagatcatgcagaatgtgtctttctgtgcctagcttatttcatttaacataatgccatccaggttcatccatttgtaacatatgacaaagttttgttctttttttaaggctaaagagtatttcattgtgtatatatacattctcttgatctattcatccatttttgcatgcttatgttgattccatattttagctattgtgaaaaatactgcaatgaacatggaagtgcagatatctcttcaaaatactgattttaattcctttggatatgtaactagtagtgggattgctggattatattttagttctatttttaattatttgaagaacttccatagtattttccataatgactgtaaaaatttacattcccaccagtagtgtgcaaaggctccccttttctccacatccttgccagcatttatcttttgtcttttatatagtagccattctaacaggtatcaaacaatatcattgtggtttgtttgcattttctgatgatcagtgatgttgatcgttttcaaatatacttatgggttatttgtatgtattctattgaaaatatctattcagattctttattcactccttaattgggttatattttttctattgagttgtctgagtttcttatatattttagatattaatcccctatcagatgcatggtttgcaaataatttctcccacttcataagttgtctcttcaatctgttgtttccttttttgtgcagaagcttgttagtttgatgtaatttcatttgtctatttttgctcttattgcctatatttttggggccatatccaaaatataattgcccagaccaatgctgtggacctttcccactatatttttttctagtagctttacagtttcaagtctttaagtctttaacccactttgttgatttttacatgtggtgtgtgataagggtccaattttagtcttctgcatatggatatccagctttgccaacattattactgaagagactgtctcttccccattgtgtatttttggcatctttgtcaaaactcagttgactgtaaatgcatggatttatttctgggatgtctattttgtttgttctattggcctatgtgtctatttttatgccagtaccatcttattttgattactatggctttgtagtgtattttgaaatcaggtagtgtgatgcctcctgacaaaaaaaattgtcacttttgctcaagattgctttgttaaagcagtctttaacgaaaggtcttttgtggttccctgtaaattttagggccttttatttctagttctatgaaaatatccttggaattttgataggcatttcattgaatctgtagattgctttgagtagtatggacattttaacaatataaattctttaatccataaacataaaataatatttgtatttactgtgtcttcttcaaaccgataacttaactttgatcatatgaaaactctacactttgattccaccctgtcccagctttttaaaagatggggtcttgctacattgcccaggcttgtctcaaagtcctgggctcaagtgattttcctgcttcagtctcctgagtagctgggattataggcatgagctactgtccctggctcccacattaaaaatttttaatgttacaacttacatctttttatattgtgtgctctttgacaagttattgtagcttttattatttttaatagttttgtgttttacccttaatactaaaaatatttgatttacacgccaccattatagtattagagtattctgaatttgactatgtacttacttttattagtgagttttatactttcgtatgttttcatcttacttattaaaatctttttctttctgcttgatgaacttcctttagcattttttgtaatactagtctcttgacaataaagtcctccagcttttgtttgtctggacaattttagtttctctttcattcctgaaggacagttactttttttccttcagcactgtgaatatatcattccactttcctggtctttaaagtttctgctgcaaagttcactgttagccttattggaattcccttatgtgaagtgcttttgcttgctgcttttaggatcctctctctgcttttgatttttgacagactgattgtaatctatcttgttgtagtgttgtttggtttaaattttattgaaagcttttgaccttcctatacctatatatttatgtcctttcccagatttggaaagttttctgctattatttatttaaataagctttctacccctttttgtctcttcttcttaaaatcccataactcgaatatttgctcttttgatgctgtcctagatatttcataatctttcttcactactcttcattttttttcttttttctcatttgagtgtatattctaaaataacttttctttgagtttacaggttttttcttctgcttgatcaattctgctgctgatgctctttattgaatttttaatttcattcattgcatttttcagctgcagaatgtctgtttgatcttttaaaaaatggctttactctctctattaaatttcttatttactttttctgatttcatgaattatttctctgtattagtattattttttgaagttcatcaagcttcctaagaataattagtttgaatcccttgtcagacagtattatatttctccacttctttgaggtcagttattaggagattattgtgttcttttggtggcattatatctctttaatttttcatatttcttgttcccttatgttactatctgtgcatttgaagaagtagggacttattccaggcttttcagactgactttgtctgggagagcccttccccagtcaatctgtccagagattctggggagaccattgagtgtggtctttgggcaggtttgagtgcttgggcagcctagcctggtgcctgggtcagcaggtgggtggacgtgttacctgggtggggttgggcctggaatctgtattcacaggagctagcctgaagcctgggtccatgggggctggcttgctcttggggtggcccttgagcctgagtctgaaagggctggccaagtactgagatgagcctgaaacgtgggtctactggagcaggcctgtagccttagtccaaggggccgggcctgggtcctgggtccatggtgtctgaccttgagcatgggtcttcagggatggtactggatcctcagtgcatggggaactggcctggtatttgggtctactgggatgggcctggatcctgggtctgttagggcaatcctggaccctttgtcttctggactctgagaacacagagtctggtctagagtctgggtttggcctcatgttgtggcagttgtagttcctgggtctgcaggggcttgtctggatcctggcattgcagatgctggccagtttcctggagacgtgtgtgctggcttagagcccgggtctgtggggacctgcctggagcctgagtttactggggctgaccttgggggctgggtgtgtgggtgctggcctggaggctaggttcacaagggttgtcctgggtcctggccataggggctagcctggagcctgagtctctgggggccagtctagtgctgcggtctactgagataggctggaccctgggtctactagggtttggggccatagggaacatcatggtactggctcagagacagctagggacagtacttttgcctcagagatcactgaaattattcaaactggccaatcttgagacacttaccctgcctcacctgctccttcttgcaggaaccacagaaaaggtttgcccacatttctccctcactccctctatctcttgactgaaaaaggtgctttctatgtgcccccctgccctacccttcccatggcaaggtgtggctctcctttgagatatgtgagtataacaaactctcttttaaaaggcagtaatctcctgatatgttcgctttgtcatacctaaataatattaaatacctaaataatattaaaacccaattttttaaaaaggagcttggaaggcaaaggactagaaaatcagtagcaaggatgtctgtggtagggaaagaggaccaaaatgtgaggagacatttactgtgaagacttgtgtattacatattaacacctgctgggaagcatctatgatagattagaccctgacagccaagatgaaaaactcaacaagttgacattaaccagctttcttttttctttttttctttctttctttcttttttttttttttttgcgacagggtctagctctgtcgcccaggttggaatgcagaggtgcggtctccccttactgcaacctctgacttccaggctcaagccatcctcccacgtcagcctcccaagtagctgggataactagccttcatcaccatacctggagaagtaactgcaacacaaggtagaggacagtggtgagcatggaaatgcactgcttagatctcctgctgcttcagggtgtgcaactgatggatgcccccagctactgtcctctgcatctgccactatgtctgtgcagaagtcatggatgcttccatcaggttactcccagccaatgactgagtgaggcccgaacactaaggcaggctcattctgagacctgggcctcttctgataggtgacttcagttcaagcgttgtctttcagcctgactggcactttaccaatgttgtaattcattctgagactcttcctccttccttctctcctccctcagagcaggcagccctgcatcatggtctcatgctctccttgccactttggctacctccctttgtccctcacaggcattttccctgacacacactcttgattacctaatcctgtctaggtatctgcttttcagagtgagtcctaaacaaacctactcacctatagttttggtttgaatagttcaggaaatgttgaaaaaagggagaagaagaggaagaagatgggagaaaagaacatgctttttttttccttaatagttattactatcaagtcaagatgattaaattccgttagaaacattaaaaagattaaggttgctttttaaatgaaaggacaatattcatcatattcttaaaagtttattctttgtaactattatgcaattatgataaaaatgttagatgtcaacttaaagcatgctagggaataattggcttttcaaaatttgtttataatagttacaaataaaattttggaagacttgtccagacttctactacctttgtggtccttaactaaatgtgaaatattaatcatatccttttttcagatcctaagggaaaagccataaaggatggagagagagacagggagagagagaggagatccagcagtcttacagatttttctgtggttttaaatatacaatgctttatctctttgtcttcttgtcatattaacaagcatttaactctgaaatgacatcttgggcctgggaagatcatggacaaattggagaccagttatccaaatcagagcctgtagcaccagcgtctcctcaggcttggctaaggagtttccacctcgagagagaagagagaatcagggatgtaggaaggtgaaaaggttcagggaaggttcagcctggctggtactttgtcaatgccaggtgacatggcattgcaggagacatgaatttgtgtcctggggcactgtggcagaaatcctgctaagtactctccttcacagaaaactgagatatgctgccccagaatcagggactggggatcagggactctaggcaagccatcctaaggaataatgaatttataatccctgaccttacaatttaaatatgaagagaaaggtgctgtgaaaggtatcgtgaaaaactaaaataataacaataaaaattcaataacccttgagcaacttagagattatcttgtccaaatgtccccttcatacagaagagaagggtgatgccccttatgtgaaatggacagtgcatatcctgagcaaggaggtctattgagccacccgcttcactgttccgaggcagatctgtgggccaacccaacttgaaagatctgatctcaatgatttccaggggcatgggcagttatcaactccttctaagatgaatgcttctgcaggaaggtttcaggcgcagccgagaagggcagatctggggctccttacctcaatccaaagtccaccaaagctctgtacactgatgttgacagttgaagaagcaatacttctcgatccccaggcaggctttatagtgcagcacacaggtaagagggtgaaagggcaggatagagtaaactctgggcaatatccaggtttcggtgcagctggagaaagatgccacagggtgagtcgagggcaaccataagtcacttccaggtatcagggccagctcgttccacggattcctcagaggaaatgttccctaaccccacccacacccaggattgtcacgccttactcactcacactcttcaggattccaggctgaaccatgcggaggccaaagaggacggtcacagagagtagagagaggctgctcagcttcttggtgcaagaaaagggcgtgggtgcacctggaggctggacgagtctatgtcagttctggcggggctccaccagcaggcggcgctgtggctctgggggctggaggtcagaggtgcctcaacttgacccggaaccatcagctgtttcctttcacctccaggaagagataacgtgaaaccatttgtgcggtataatttatgagagccctcgtggactgcctttcttcagggtgttgcagggctgccctggctcttccttattctgactttatccagcggcttttgaggcaataggagggcattgtctttccccaggcttgtatcaggtctgaccaactcccctcgtcccagtgtgtatccagaacaattgaaacccacccctcccagcggtgttcacatatgggtgcgtttggggtaccacatcgaagttgaaacacacacaaagctagatattgtgctatcagtaagataatttctagattcatagaaaatataaatgcattatgaactacagagaaataagtttcagttgcgttattagtgtttgctcctttaactcctgtctttatgttgccatgactctgcaaaaactttatttgttgataaaattaaaagtctaactaggttattttgtaatgtgacccctaggctaaataaccgttctgcctctctgcactcctgtaaaagtgtgtgatgtacctactcacttggtggctgagaacatagctatcagtaatggtgagaaatgggttatgagtgcacacaggaaaattggtacctgatgtggaaggtagagaaatactgaggaaaaagctctctgaagcaggtgttctatctatctatctatctgtctatctatctatctatctatctatctatctatctatctatcatctgtctatcatcaacatcatcatcatcatcctttcctctctttctagtgcaatctgtggttacctcctagctgtgtgtctttttgctgttttatgacacaaagctggaaagttgatatatctttgaggtaggacagtaaaggtatattgctggccttgccagctgaaggcaaattgcttctggtgggccttatggacaggaatggaggaaaaggcatttgccaagtcaatggctgtacaccaggtaccaggaaatgtgttaatttgctcaagcaatgaaaccatatctggtacagcagctgcaattggcgtcaccacttggttaagcttatgataatccactgtcagtctttaagatccatctgtgttctgcccaggccaagtgggagagttgatcggggacgtagagggaatcaccactcttgggtctttcaagtccttgaaagtggcgctaatctcggtaatccctccagggatgtggtattgtttttgatttaccattttcctaggtagaggtagctctaatggcttccactggcctttcccaccataatagccctcaccctaccagtcagggagccaatgtgggggttctgccagctgttaagtatggctatgccaattacgcattctggcactggggaaatgaccacaggatgagtccaggggcccactggacccactataagttggacctgagccaaaactccgttaattacctgatctccataagcccttacttttggtcctggaggaccacaatgatgttttgggtcccctggaatcaacgtcagctcagagccagtgtccagtagtccctgaaatgtctgatcatttccctttccccagtacacagttcccctggtaaaaagccagaggtctccttgggaaaggatgggaaaaagattcactgcataaattggtcatagggtagtggggtctttcctcaaggggccctggcctccccttcattcaaggggttctgggtctgtaaactggttcaagtctggaaattgattgaggggccatgattctctgcttttataattcaaattagtcttttgtccattcgacctagaagttttatgcttgtataaattaaataggaatgcagtaggcctcctatcaatttcactttttaggaacactaggattaattagccagtgccagagctctacatgagtcagactgattgctgctttgcctctgctttccattatggtagctacacccaccttgcctttgacagttgagtgctgccacttggctcctgccacctcgggcttcagttattcccattgtatttaagttttgtagttaagtgactgcggttcccactgttagatctgacatacagaaaagagcaaatacagggctcttcaaagatgagggtgctgacctcacaaatcgatttcacaaggcattggtcaagggtgtatcttctggaccctcccagctgggatgagtaggtctaaagtgactaattcgctccagcatcccaatctccctaagcctttggatcccttcctctacattaagccaagggagatcaggcatttccagctcattcacagtgggccatcttttaatccatatttcagctaaacaagcaaataaactattagaaccttttaaaactccctgagctgcaacattaaatgcagagtccctacttagtgggcctaaataaagaaattcagcctgatccaactctatgttccttccaccattatcccacacccctaatatccatgtccatgcctgttctccagatttctgcttatataaatgagaaaactcaagcaattctttttgagtgtagtgcatctcctcatgggtcacactctcaacctcacctctaggggcctgctgggactttagtctacttatagttctagaagcaaacaggggtgttgggggtggctcctgaggagaatcaacattatcttgcctggcaactgcctcaggggaggccatcactgttgtctcaggcagcacagggtttatctccccagacaaaggtggaaaggctgatggcagcacaggtcagcgaggtgatgttgccactactggggatgaggaagctgtttcttctggcaaaaaaaggttcatcagagtttacaaactcagtgtcctcagcttcatcagggtcctcccacatgtccccattccaagttgcagggtcccattcttttccaatcaatgacacctggcgaggctgtgcatgcaccttttgttgcaggtcagccactcacatgataagagcttgtgtctgtttttccacaatttcagctctttctctaaaggagataagactctcagtcagggcaatcttagcagatttgagactcagtatctgcttctgaagctgggagatagaatccctgagttcatcattttctttcatcacttcgtccactgaacttaggagcaaccaaccagcttcattatgttccttggttctccacatatggtcaaaggtattatgtatagagtcactaaactccttgcctctcacaagcagtgaatcaggagtgtcaaatgtgcttattttgcataactctctaaacagttaatgccaaggactatcagtgttctccatactactattagaactagagtccttagaattttttgttctaatcatattaagcagcaaactccagaaaccccaaaccaatgaaagaactccatttttaatattctgttcctctagaaccactcttggtaccaaaatctgtattagtcagggttctctagagggacatacctaataggaggtatgtatatatatatatatatggagtaactcacatgattgcaaggtcccacaataggccatctgcgagctaaggagcaaggagagccagtccaagtcccaaaactaaagaacttggagtctgatgttcaaaggcaggaagcatccagcatgggagaaagatgtaggctgggagactaggccagtctagtcttttcacatttttctgcctgctttatattacagccacacaggcagctgattagttggtgcccacccagattaagggtgggtctgcctttcctagcccactgactcaaatgttaatcaaatgttaatctcctttggcaacaccctcaaagacacacccaggatcaatactttgcatccttcaatccaatcaagttgacactatgtattaaccatcacagtagtttcatagaaatagcattgaatctgtaaattgctttgggcattatggccattttaacaatattgattctttctttccatgagtatgaaatgtttttccatctgtttgtgtaaactctgatttcgttcagcagtgttttgtcataattgtagtagagatgttttacctttctggttagttgtattcctaggtattttattttatttttgtggcaattgtgaatgggattgcattcttagtttggcactcaggttggacattgttggcgtacagaaatgctacttacttttgtacattgattttgtatatcatacaggagctagggcctgccacaggggcctcacagttctgcctggtgccctatactactgtggctgagctggcacccaagttgcaagacaaagtcctcttaactcgtccctctcctcttgtcaagcagaagaaagggatctctttcagagctgtgtgctgcactgcctggggttgagggagggtgatgcaagcactccttcagctgcccaggctggtgcctcactaggtcgcatgcaccccatgtccactggcctctgagcccagcacagcactaggatttgtccaggagttgtagtccttgtggcctagacggcctttcaagtttatttagtagcccatagcactttagcctgcagtggcgaggcttgccaaaactcaagttccaactgctggaatgggtgattgtcctctggctaagggtcatctaaatgcgccctccgtgggcatcggctgagttatttctggtgttgacagcactgagttccaatgcagagtcccacaagcactgagctctccctctcccagtgcacgtattttctctctgtgccatgcagcctctgccgggggatgaggagggggttggcgtcagcaattcaagactctttcatatcctctacagtgtctctttcagcgatatgaagttagatccaggtattgagattactcacctgattttctgttttttatgaaggtattctttttgtgtaagtagttgttatatttggtgttcctataggggggatgatccatggaggcttctatttggctgcctttctctgtctccaaccttctgtttgttttcgtttttaaaaacatataaacagtttgtgctcaattataaattttcccctgatccatggaatgtattcacttaattatttgtttgggtatgtgaaacttccaacatggttccagagtcaggtctatgcataaaggtatattcagagaagaatcaggtatccatctccattctctctctactttctacaccattcctgacaacaccctgtaggtgatcactctcatggtctcttggttttttcctttgtgtgtttcttttttcctgcattgagtagaaaaatgaatattttcttcttttgctttatttattaaagacactttcactttataatgtatctagaaatcatacctcagtttatagccatcttcaccattcctctgaacagctgcataatactttgttgtatagatgtactattaacaccatttactcaatgactctccactgtataggcgtgtgggctgttttcaatactttgcagttacaaacaatgctgcaattaatacatttactttaattttccccattggggcttggattgtcttattggtctggcattcttactgtaactctttcaaccagggacaacctaagctgatcggtgaatatcttttgtgaaagacctctgtatcctcctgtcttggttgacaacctgtggaaagaaaaatgatttgaaatcatcacagatcttttcaattccaagctctgttctggactccaaaataattttcccatctgtatgaggagggcagttttctaggatatgtcagcagggatttcattctaaattcaatgggaggttgtggctcagggcatctgttacaagctggaaagaacctggagcctatctggcccctaggcactctgcaatcctggggtcagatacacatggctggctagaacagagtctgcaagtggctccagtgtgcctgaggtcatcagtgatgctcactgctctacccctgaaatgtacccagagcctggagagacgctatctgggctccttatcacagaaaaactttgtagtgctgaggtctctaggtcttcagtggaggagggtggtgtcagttgagttgtgcctaaaaccacactttctgacttctctacttacaagtcacactgaacatcgcagctgccttttctgggtaatctctaacattttttttaaaaatggaaacctttatctttgtttcctttttttcatttctccccaacaaagaagccaaggttgcccgaatggggccatcagtctccgtacaatcaagaagtaacacagtcaggattgctcagagggccccacgaatctcaaatcccttatttttctgttgtttttttttcccccagaaggtaatttcagctttagaaatggacagagactgtccaaaatcctatatcaggttggtagcacagatggggctacaacaaaatctgtggaaggaaaacacaaagtttttctttccctgggacccaagatgtaatgaaggtggctattgtaaacaagtttcattcttggcttctaagtgtaataatttcattcctattttggggaaattaactaccatataagccctggaagccagaggctgtgccactttttataacagagcgggaaaatctggatgcttgttttctctgcctccactgagagacaacctcatatgagcacatgctgggttaatgtcatatgatgcacaaactctaaactggacttgggagctaatgataataggatgtgaacatttattcctgggacatttatagcaatggcagctgtatttgacttttcagaagagaaatggaaatgatggtagagacattggctgtgagacatgtaacctccacctgctttcaggtatcaccagtgagctccactaaggccagtatctggctgattttgactgtgattctgcattcatagccttgcttgcttttgccttttcttataacttgggtttataggttccctaatggttttgtgatccatttaattttaactgagccaagactgacttctttgtaattaagaagtgaatgactgggtgactcttgttagggaatagatgtgtggagagctccatgaattactctaaaccaacaatcacagctggtgaaagttatttaaaaaattttttaagattttatttttattgtacacatttaaggtatacaacatgatgttttgatatacatatacatagttaattactatagtcaagccaattaacatattcatcatcccacatagttttcttgttttgggaagaccacataaaatctactctcttaccgaatttccagtagacaatactaataatcaagtaacccagtgacttctgctctgcaatagcagtgtgaggagctctgtggagatactctttaaccaaacaaccatctgggaattgttctacatgcatacatttatttttaaaactctactaaaccttgaaagaacacagagtgcccgtgccatttgagccataacccactatgtactttctacctcccagctcagcatgagggaagctgcacttggggcatgtatagccaagaacagggaaaatcccttttctcccacctccctgtcaaagattatgatgtctctctaagaagaaaaggctgcaggcatcacctaacctccctcccaggtgatgttgtagaggttgtattgcaggtgtgtgtgaccaagaggtatgaggctccattcttccacccaacaccacttgtattgtagagggtgtaccccaggcattggaggtaaagaatattgtgaccccataccccctggcacagctaattagtagggtagagttttcaagttagggaatgcatgccaacaacatcagaggctactgcttatgcccagaaccatgttggtaaaacaaggctgccaccctgagagaagtgggccactatttccaaaaaaagctccatagaaaaagctcactgattttccaatggtgaaacctaagctataagaacagagggctccaaagtcctcccaaagaaactgactattatcttggaacagagtgtgaggaatgtctagactaatagtgttcttgaaaacaatgggaattttagtggtaaaccatgaagaggaggttggcagctccatggcagaaaatctaatgattaaggaaactgaacataccacctgataaagtagcatttgagaatttccagaaatatattgagggtaaattgtcatgaaaaagggagttacccatgacacattttaatgctaccaattttgtcataataacatgtcaacgtaattagaacatatggtattaatgaaggaagtacacacacatatcagtggaaaaaaaagaaacttggtgccttcgaaaatctagcagacaataaaggcagaatcctgcattatccaagaaatgttagataagtcagtaaatgatattaagacagattaccagcaattcaggggaaatactggatttgtatcttacacgttatctcaaagtatgtttcagatggtcaagaatttaaatataaagattgaactataaaagtattcaaagaacacgagtggagttttgtaaaatgttgatatgggaatgactttctggagcaaattggtattgttaaccatatgcaaataaaaaaattttgttgggaaaaatctaacatattgtaatataagcaattagaaattcaaaaatatgagtacattcgtggtgggaataaatataatctatattacattgaaagaacgtttataacataaaagaaaacagatgatccaatagaaaaatgagcatgaaccacatatatatgatttatgggaaaagtaatgtaagtagataacagatgtatgaaaataaatacaacttcaaccaaaattaaataaatgttatttaaaacaaacacacaagttatttttttgttcctatgggatggtctttttactactgattttgggcaaatttcatttgccagtagtctgcgtctcagttattgtgaaatgaataccttgatcgcttaagacctttcttactatgagaaagacttcagggatctaagctaaggtctctgccaggggaagcgtgaatttgcaatagaggagcagaaaatgtgtgcagtggaatcactgtaagtgaggatgccaaggtgatgcagaagaggttgatgctggcagacttgacattttgtggcatgtcactttattttttatttttatttttactttttttgagacaaggtctcactctgttgctcaggctggagtgcagtggcgcgatctcagctcactgcaacctccacctcccgggttcaagcaattctcctgtctcagcatcccaagtagcttggactacaggcgcatgccaccatgtccggctaatttttgtatttttagtagagatggggtttcgccatattggttaggctggtctcaaactcctgacctcaggtgatccacctgccttggtcccccaaagtgctgggattacaggcatgagccactgcgcctggccagtatgtcactttataatcacgttcctttcatcttcatggtgtccccaaatctatgtttttctttgattgcacaccttgtctcagtcatcccattactctgattcctgctattactttgctttctgtcttggcaaaacgagttcatcacaagtctttcctgaaaggctaccaaatcttccttccttggtcaacatcctagcaaagagaaatgacatatgaagacaggtagttcccagccccaagtctgctcctgacttctagagtaagcttgatggctcccctggactccagttttcccatcttcatgatgagggtgtttatcgagattatttcaaagaggacttccaacttcaaattcaacagaaggttgtggctcagggatctattataagccaagaagcacatgatgcttgtgcgtgatccttgtgattctggactccaggagacacacacatggctggctagaaccgagtctctccatcccagcatgtaccggacaaggagatcctaagaagactgtcccaaaattgtcatcagtgattctctctactcaacccctgtggagcacacagagcctgcaaatatgatagcagagtttttagtctcagcaaaaactcctctgctagcgaaactgtttctaggaggagcatggttgcaggaggctgtccctgaataaccatgtgttttctgtctgcaatgcaaattccaagtagtgaattaccatactagcacctctgggtaacttcagtatcatcatgcagccccaaacttctcatctttcccatcatttttgatctcgcctcaccattacactcagagatactacaaggcagtaggtagtttagagaatccagccaaaaagccctagagagtctactgtctccaatctccactttgcttatacagttgggtaaaatgtaggccacaagctggggctagaacacagagtggaggagagcagggaacagtagctgctctggtgctcacaatgagatgagaacagtcgtgtggacaacttcatgtcttggtttctaagcatacgagcaccattcccagaagttgcaaagtccacatgcctacttccctgccttcttggaagcctccacatgtgcactggttcatacagtcagaggaacacactctgtgatggactgaggactgggatagagaaagaagcagatatggagatggcaggaagtgtttactctggtagcagtggcatcagtggctgggtatctacttccaggaagacaagtggaagaggtgtccaatttggcaatgttggtgggcagatgtggtgtcaccatgcctggaggcagcagtggtgtgctctgttgtgattggagagaaaaaggctgtgggactggtattgttgaggtatgtgtgcccataaaatcactaagcactaggctgggaggacaaagtattatctagtgtggagaagctgaggatgcagcctgcgattaaaatatggatagaaaaacaggtcaggccaattaaaggtgatcttgtgaaataaattattgctggcggagaaactcataaaggggtatctcgctgtctagctcaataagagaaaacacattttagggatgttttcaaggtgattgtagagtgtagacttctacttccagaggtggcaacatttttgctgtttctgttgcacctgctaatgtaaggagtgcctggagtttgatggggagtttggaaccctgtgaaaatccagtgtaagagagatttgtatgcttttgactgctcacaatgtggcagtcctttgttacattgtggcacctccctattcacaccatatttgagacttggtgagtgacagaattggcctcttgttgcaggaatgaaacaaaccagagagtcacttttctttacccattagacctagggctgtgctgataatatactcagcaaatgatgcttctacctggagcattgagaactaaaagactaaaagcagcaacgataaaggggcattctttcttagcacaaggtagttttgttgttcacagtgacacctgatttcagggtcatgggtgacagtgatgagtgtccaggattgcagcagtaggacccatgtcacacaattgttgaggggtggttctggctgtgatcatgctgcctggatactcttacttcttacattgcctctgagtctgaatcttccgtcttctcaaaattctgtaagccgcatttacagattgggttatccagaaagcaagagctgagacacagctaagagggcaagttgccttgtggggtcacacctgttacagtaaaggaaaggaagaaggactggcagaggatgccattgccaacctgacctgacaacatctctggcaacccatcagggagctctggagcaagaattttccattagaggagtccaacattgagcagaaaaggtagacccttataccacagccttattcttcctttagctggggcccctggttctacgtgatctgagctcaaacactgagggttactttctgttctaaattggatggaaggctgtgtgattaagggacatactaagaagtgataaacagtgggttcctgtttttacctcctagtgctggcacctgcttaccctgagaaggttggctcatatgactggatgaaagagagtctctctgtcccagttccagacagggcataagaagtggcttgagttttccttaaggagtccagtagctgctctattattactcctcaaggatgattatggaacctcagggattagcacgggctcttgggctcagaaggaaatcagggtcctggtggatgttgcattgttggatctaggtggtgggagcaagaggagtaggatagagaatatgtgtctcctcctataactgaaaacttcacatttgctgtactcatgaagccactgtgagtggtttgaatggtgttttaggtaatctaaatgtgcaaggcagaccccaaatccagtcattttcccccttcttctaacttcctacccacatattcagatgtgccctcagaaacctctaggtagtttggaggctctgttagaggggctcagaaacctccacatgctcaggccttcacttttccagatggtgctactgagattagtgagaacaagggatttgttgatgtccgttaggagtaggacttaggtctggaagatggcacagtactgtcagttcctgaattccagaaaggaatcagagaacaaatggtgcctagaaggaggatgaagctggataagcgaatgtgggtaaacagactctcttctctacccagttacacagtcttctaggtgggcaggaccacgtcttgataggcctaaaaccaaaggacacgtgttccaaaattttctctctccaaaatagaccctgatcatgctgtgaattcttttttcctttcaattaataatttcctttgaaattcaaattaattggaaataatgacaagctccaaatatcaggagacatcttcagacatcagttggaatcatagaaattacatttgaaacaattggatcaagtcagctcttttcatacaatggtacaatgaacccatgtctgggaatcagggagccagttgtattctgggcttgacttactgagtgaaattaggaaaggcattcctttcttcaggggtccgtgcaatcaagataaagcaaagagggaaaatacatctctctacagtgattttatttcttccttatgcccttcaagaattgttttgttaatcaagtgtcaatatctctagggaggccatgcaggggcagcaaagtgaaacatgttggggcctcatacctctctttgaagtcctgggtctccaagcccttgtctggttccagcactccttggacaaggctgtcttccctagtaacagcacctctcattgcttgggaagttgggagaactggtaccccatacgtgcctttgaaacttgatttgtgtctggaggacacatccaatgcatggatcacattcagaattattgcagagggaagcaatgaaatggcagcaagaaaattaacatcttttcaactcgcccaagacatgactcacagtttcttttttctgagttgatctccatcaagtgcattaataatttttctccaagttctttcagtgagcagtttctaggggatctttggcatagttgaagacaatagaaggcagaagaggaggaatgagtaacttccacaatctcctcctcaagtggtataaaattactctatcattaagaaattcctaagcaaacttcaccctcaacataacttgaaaacaaagaatgccaaaaatacaaaatacctgtcagtgaaaagggaacaaacaacaaatcccagtgctggggactcacacttacctgccctttccagccccactataaagcttaaagctttgcaaaattgaccaaaacacacacacacacacacacacacacaccccactgctgaggaaggagtgacatcaccaagatggtgaaatagaaggtcacccagtcgtgtcccaccacaaccataagaattctacaccattcacaggttaaagtctctctgagggagcctctggatccagggagaaatttgtgaaatgccagtggagctcaagcccttagaggattattttgagagtgcagacagacacccaggtggctgatctgctgaacctgctgctcgcgagttcaatcctggaagtggcccagtcctcccagggtttggctactgtaccatgttgactttagcctgcaaccaaaaccatctgccaaggggtccagaaggaattacacacacttggcagaaaggctgctctgcacactgacattgtctggatagtgaacctgaaagttgccctgtggctttgtccagcccccatcaactaaagtcccagcttagagctgcttacacaactcacagggagacccatacatatctcacaggccagcagtctgagcctcccggataggcatgccatcctttgtcccacagcaggtctagatgggatctgctctaagctccagcccatcttgccatagttggggaactatcctgtcagtgctgagatctgctggaagacatgtactggcctggacccaaaagattggctcttcagcttccatcccacagcagatcctgaggggattccagttgcagcttttgtccttcctgctgaaattggaaaactctcttgtctgtgcaggaacttgctgggagacgtgcttacctgtaaaccaatgagaccaggttttcagcctctgccccacagcatattgtgagggggcccagtctcagctccccttctgactgcaattgaggaactaccacatgtgctaaaatcttctgaaagatgtgtgcctatctgagccaatgagatggacactccattctctcccccacagcagatcatgagagggcccagtttcagttccagccaaccctgctgcaattggggaactatgccacttgttcagagtcctccctgaaaatgtgcttctgcctgagccaacatgacaggcatgccagtctctgtcccatgaatggacttcttgccacagtagatcccaagtgagcccagtctcaactctagccactctcactgcagttgggaacccatctgcctatgtagagacctgcaaaaaatttcatccatctgagacatagcaacatttttggactatgatttctcaccagcattcccacatgtccccagtaccctccttgggtcttctgcatgtccatttaaactagaaatctgcgttaacttcagagccttgcaagacttacagcaagcctgggctcagagtgtcctctagtgttgagacaattgcaatggtctcagatacaggaaactcattaagcggtctgtttggaatctctggaaggccctctgaataagaataagagcaaacaaagccagactgtgaagattaaaatgaatatctaatctttaaatgtgtagacattgttgcacatccacaagcatcaagagcgttcagagaaatataacctgaccgaatatgacaaaataagatgccaaagactgacccttaagtgatggagatgtgtgatttctcaaacgaagaattcaaaatagctgttttaaggaagctccacaaatttcaaaaaaaacccctacagagtatctgatatactttggctgtgtccccactgaaatctcatcttgaatggttgttcccataatccccatgtgtagtggaagtgatccaccgggaggtaattgaatcatggggacagttacctccatgctgttctcatgatagtgagtgagttctcatgagatctgattgttttataaggggctttccctgcttttgctcagcacttctccttcctgccatcatgtgaattaggacatgtttgcttccccttccaccatgattgtaagtttcctgaggcctccccagccatgtggaactgtgagtcatttaaatctctttcctttataagttacccagtctcaggcagtctcttatagcagcatgagaatggcctaatacagtacattgttaccaagtagtcagatgctgctgtaaagataccccaaaatatggaagtgactttggaatggggtaacaggcagagattggaacagtttggagggctcagaagaagacaggaagatgtgggaaagtttggaacttcctagagacttgttgaatggctttgaccaaaatgctgacagtgatatggacaatgaagtccaggctgaggtggtctcagatggagatgaagaacttgttggaaactggaagaaaggtgactcttgctatgttttagcaaagagactgttgacattttgcccctgacctagagatctgtgtgaactttgaacttgagagggatgatttagggtatctggcagaagaaatttctaaccacaaagctttcaagatgtgacttggtgttgttaaaagcattcagttttatgtattaacaaagatatggcttggaattggaacttatatttaaaagggaagcagagaataaaagttcagaaaattttcaccctgacgatgtgctaggaaagaaaaacccatttttggtggagaaattgaagctactgcagaaatttgtgtaagtaatgagaagccaaatgttaattgcccagacactggggaaaatgtctccagggcgtgtcagaggatttcacagcagcccctcccatcacaggcctggaagcctaggaggaaaaagtggttttataggctgggtccagggcttgcttctttgtgcagtcttgggacttggtgccctgcatcctggccatggctaaaaggggccaagatacagctcaggccatggcttcagagggtgcaagctccaagcctggggagcttccttgtggtgttgagcctgtgggtgcacagaactcaagaattgagatttgggaacctttgcctagatttcagaggatgtatggaaatgtctggatgtccaggcagaagtttgcttcaggagcagggccatcatggagaacctctgctagggcagtgtggaagggaaatatgagatcagagtccccacacagagtccccactgggtcactgcctaatggagctgtgagaagagggccaccatcctgcagaccccagaatggtagatccactgacagcttgcaatgtgcaccttgagaagccacagacaatgccagcccatgaaagaagcctggaggggggctgtaccctgcaaagccacagggacagagctgcccaaggctgtggagctcaccttttgcatcagcgtgacctggatgtgagacatggagtcaaaagagattattttggaatttgaagatttaattactgcctcattggatcttggacttgcatggagcctgtagcccctttgttttggccaactcatcccatttccaatgggtgtatttacccaatacctgtacccccattgtatctaggaagtaactaagttgcttttgattttacaggctgataggtggaagggacttaatttgtctcagatgaaacttcggacttggacttttgggttaatgctagaataaatcaagatgttgggggactactggaatggcataattgtgttttgaaatgtgaggacatgagatttgggaggggccggggcagaatgctatggtttggctgtgtccccacccaaatctcatcttgaattgtagttcccataatctccatgtgtcaagggagggacccagtgggaggtaattggatcatgggggtggttacttccaggctggtctcatgatagtgagtgagttctcatgagatctgatggtttcataagggacttttcccccttttgtttggcacttctccttcctgccaacagaagtgccatcctttttttggcacttccccttcccatggaaggggaagaacgtgtttacttccccttccacaatgattgtaagtttcctgaggcctccccagtcatgcaaaatggtgagtcaattaaatcgctttctttataaattccccagtcattggcagtcctttatagcagtgtgagaacagactaatacagaatcaattcagaaacgtatgagaaaatgttaacagagagattgaatataatttttgaagatcaaacagaatattagacctgaaaaatgcaatgaataaaatgaaaaagatacaattaagaatgtcaaaggcagaattgatcaaataaaacaaataagaaagaaaggaagaaaaaaggcaaacaacaataacaacaataaaaatgcagcttctttttcttttttccttggaaggggtttatgacacactcttccagtggctacctagtggcctggcttctaactaacttgcattggggagttaaagaagcagacaagtgttaacctgagaagtagatagccacttttcaagctttcttctccagctcactgcagtgataattaagtctattaattccacctggaaggaatttgttcacacatttcacacatcaagtgccccaacttttacaatttccacctgagggaactaatcctcctagttctgggagtagaggagactggaatgcatgtctcttccaaccacagttaaaaaaagtgacagttttatatgggcatgtgagcacatctggggttacatcgcccaggaagagtaaggagaagaggtatagaaaaaccctgtcccatttttccccagaaagtgtttatgccatgtatcagttgccccaagtcagacagctacctcctgaaggactccttaaacttcttagctctgtgaacagggggacaagcatattctagtctttctagatcatggaacaaaaaagttggttttaaatgggagtgcaacaaattccaggggctactcccccttgaagaagtacagaaaaggagcaagaatgtgcagctcttattttctctccagaaagggcttacagcacactcttcctgtggctaagtgatggcctagctattaatgaacttgcatttgggagttaatggggtaaacaaacaagagccctctgacagccagagcaagggtttggcacttcttgagacttccatccagcttgcccaatgataaatctaggcttactcattcttcctggaaggagtttggctatggaccaagtactgcaagttttatagctctcaccaaatggactatctctttaacaacttagctgtgagagtcaatggggctttgtattcctgagctgccctaaactacagaaaacaaagaagtggttttacaacaatttcgttccagaagctatctgtctatagcagagggtgttatgatcagagggtgcagcatcagtgtgagcacagcatttcccacgatcagagggtgcagcctgaacaggagcacagcatttgccacagattatctccctggcttactgcaaagagttttggaccataatgcccatgctcagcttcagcgaagatagatgaaactggaacacacattcatcatcccaatcctttcagttacatttagagagtcaggcttctaccttagcagtctctgggtacagataggaggaggcacatcctaagctctatggagacatcaaaaacagagccagcagtctgaaaaaacacaaatatttgagaagcatcttaaaatctctgaccaggtggattggtggaatttttttttcctacaaaatcacagtttgacaggactggaagttgtagttgtcttatctaatatgcagaaatcaacacaaagagtcaagaaagacaaagaaacatgggaatatataagaacaaaacaaaacaaataaataaaccaaacaaaatcaggaagccagcccaaatgaaatggggatatgttatttacccaaaagagaattaaaaataatgattataaagatgctcagcgaggtcagaaggggaatgcaagaagaaactcagaatttcaacaaagagatagtataaaaaagtagcaaacagaaatcatggatctgaagaatactataactgaactgaaatattcaatagagaggttcaatagcagactaaatcaaggagaaagaaaaactggtgaattagaatacaggccactggaaatcatccaatctaaggagaaaaaaaaacaaaaaacaagaaaacaaaagcaagagtgaaaaagggtgaaggtagcctaagtgacttccaggacactaccaagagggaaaagcctatgcattattggcatgtcagaagtagaggaaggagaaaagggaacagaaaacatatctgaagaaatgatggcaaaacttcataagccaaaggaaaaaaaaaatcctgatcctagtagtaagcctaaatgacaccaactaagatgaatccaaggagactcaaaccaggaagcattataatcatattgttaaaagtttaagatagaaatggaacgtttaaagcagcaaaagagatacaaatcatcatgtataagggaaccctcatagactaacagcagatttctcagcagaaaacttgcaggccaaaaagaagtagaataacttattcaaggtcctgaaagacaaaattgtcaaccaagaatacagtacccagaagacctgtcttacaaaacatgctgaagagagttttcaagctgaacaaaaaggatgctgataagattcatgaaataaaatgaaaatataaaactcattggtaaaagtaagcacactgtcaaattgtaaacactttaatactgtaatggtggtgggcaaatcatttatacctccagtacaaagattaaaaagaaaatatattaaaaacaaatagaggtactataatttgttgagggatacaaaattataaaaagatatatattgtgacttcaaaaatataaacatgggaagagagggagcaaaaactagaggttgtatgtgttatcaaaataaagttgttatcaatttaaaataggctgtaataagtatgtcttatgcaaacatcagggcaaccccaagccacaccttataatagctgtaaaataaataaaaaagaaaagatccaaagaataccactagagaaagtcatcaaaccacaaaggaagaaaacaaaagaggaagaaaggaacgaaggatctacaattgaaccagaagacaattaacaaaacggcaatagtaaccctttacctatcaataattactttaagtgtaaatgaataaaattatccaattaaaagtcatagagtgtatgaatagatgaaacaaagactcaattcgatgctgcctacaaaagacttattttaccttaaggaagacttatagactgaaggtaacatctttttattataaaaacttgcaagaaatgaggtatagaagaaatgttcctcaatgcaataaaggccatacatgacaagccagaactaaaatcaagatggtgaaaggcttttccactaagatcaggaacaagacaagaatgcactctcccaccacttgtcaacatagtattggaagtcctagtcagagaaattagggaccagaaaaaataaaaggcatccaaataggaaaggatgaagtgaaatagtctctgtttgctgatgtcattatcttatatataaaaaatccaaaaatactacaaaaatcagttggaactgataaataaatccagtaatgttgcaggatacaaaatcaacttgcaaaattcagtagtgtgtctaaacacagttcaatgtttaaaactgtctgaaaaagaaatttaaaaaacaatcccatttataatagcataaatacttaggagcaaatttaacaaaaaataaaatatctgtatattgaaaactagaaaacattgattaaaaaaactgaagatgacacaagtatatggaaacatataccatattcattaatcaaaataattaatagtgttaaattgttcatacttaaagtgatctacagattcactgctatccctatcaaaattcatgtcattctttaccaaaatagaaaatacgatcttaaagtgtgaatggaactaaaggagccccccaataaccaaaagaatcctgaacaagaagaacaaagcaggaggcatcacactgccagatttcaaaatatattgcacagctatagtaatcaaaacatcatagtattggcattaaaaacagacattttggctaatgaaatagcatgaggaataaccccacatatctacagtaaattgatttctgacaaaggtaccaataagacacaatgaagaaatgggagtctcttcaataagtggtgttgggaaaatgcaatatctacatacagaagagtgaaaatggactcttatctcaccccttacacaagcatcaattttaaatgtattacaaacctaaatgtaagacctgaaactataaaactatgagaagggacaaatactgcaaaagaaaaactccatgacattgatctgaatggagatgtattgaatatgatgccaaaaacacagacaatgaagacaaagatacacaaagggtttgtttttagagaaaagctctcactctgtcactccattgcctatgctggagtgaagtggcatgctcacagctcactgcagtcttgacccctgggcctgagggattctcctgcctcagcctccctagtagctgggataatgtctagctaagtaaaaaaaaaaaaaatttagtagacagagggtcttgatatgttgcccaggctgctctctaactgtgagaccccatcccccaacctggccaatgaccactgccttggcctaccaaagggctgaaattacaggtatgagctactgctctaagtcaagacttaactttttgatgggctggtggattcagtttgctagtaattatattgaggatttttgggtatatgttcatcaggaatactggctggaagttttctttttctacatgtctctgccagattttgggatcagaatgatgctggcttcatagaaagagttagggaagagttgtcctagatttttttggaatagtttcactaggattggtaggacctcttctttgtatttttgttagaatttggctgtgaatccacctggtctagggctttcattggtaggtagggttttttaaaaaattactgattcaatttcagaactagtctttggtctatttaagttttcactttcttccttattcaatcttgggaggtcatttgtttccagaaatgtatccattttctctagattctctaatttatttgcatatgtttataaccgtctttgaggatattttctattctcgtgggatcagttttaatatcatctttgttatttctgattgtgtttatttggatattctctttttgtctttgtaatctagctaatggtctatcaatctagtttattctttcaaagaaccaacttttggtttcgttggcttttgtatgactttttacatcctaattttattcagatctacttattttagttatttcttttcttctactagctttgggtttggtttgctcttgttttccaagtttctctcagtgtgatgttatattgttaatttgagatctttctatccttttggtttaggtcttcagtgctataaactttcctcttaacactgctttagctgcatcccaaattattttaataatgttgtttttgtctattttcatcaatttcaaagaatttttaaatttctcacttaatgttgggaaaatggaatatctacatagagaagagtgaaaacagactcttatctcaccccttatacaagcatcaattttaaatgtattacaaacctaaatgtaagacctgaaactataaaactatagctttcttcattcaggagcaagttgtttaatttctgtgtaattattgacatcttgactgtgtaaagtcttactatttaggatcatcatacatgtttattcaagcatttttaatgtacctctgaaaacagaacattggccagtagacctcatgtttttctggatatgatggcaaaggccagaaagctaaggtgtgggctccagtgctgcctattgctccagaagtgccacctgtcttgacccaggagactccagagagactattgtttgtccaacccagtcccatcaggacatctgttcactcatctcccattacagctgcctctactgccagtgtcctaaggatgaggaccaccattgggaccaagaagctgctggctttcatattgtcagtaaggtgcttgacaaagagctgagaccaaatctgtctttatgcagtcccagcttggcctggctccaggggtgggtctggtatttacaaggaacaagacatagccttagctctatcaggaaatatccacccctttatggagggccctggaatctttacccaaaaattattcactgggataagcgacagacattacattacatcacatcaccactgattctcccaagagcttttctactttcttgcagagaagaagtgctggctcacttctcaggcaacattgcaatcaaattcttaatattttcaaacactctgagacccaagaatagaagagagttacccaaggtcattcagctactcactgggaaatccagtcttgattataaagccagggtgtttccctattatgtcctcatcctacaaaccccacccagatctaccctatcattttactcctcccagtatcacactgggcttttctttccttcttctctggtcttgagaaaaactttgtaaggaagtttgttttaaaagcttaatggctaatcattgtgaaactctaagcacaagagaaagaaaaaatgtactaatgagattcaaaatatttgggaaggcaagagaaagtatcagtaaacttcaagatatgtcttttgaaatgatcccatctgtagaacaaaggaaaaaggaagaaaaaagaacatgcctgagaatactgtgggacatcatcaagcttacctacataggcataatggaagtcccagaacaagaaaaacacaaaggggaagaaaaaatatttgaagtaataatggcaatagtcacattcttgatgatatatgtgactctatatttccgtgaatctcaaagaactccaagcagtataaacttaaagaaacctacatttatgcatattatatccaattgttgaagctcaaagacaaagggagaagccataaagcagcaagagagaagtaactcactacatacaatagattcttaagatattagcttcagatttcttgccagaaaccatgtttgtcagaaggcaatgagaaaacattttcaaagtgctgaaaaaaaaacctatcagccaagaattctgtatgtagcataattatccttcaaaaatgaaggagaaatgaagacattcctagtataaaaaagtgagagtttgtagttaggagacttactctataagaaatgctaaagggagttcttcaggctgaaatgaaaagaaactagacactattcaaagtcatacaaagaaagaaagaacactggtaaaagtaactacataggtaaatatagaagccaacattatgaattacttgtaacttcccacttttctataagatttaaaggcaaatgcatgagaatattattataaagctcattaatgggtacatgatgtgacaataaaaacatatagaaggttatactaatgtgtgagtgagcatgaatcccactgccactgctcaatgaagtgctttggccagtaccacacattggaatattatggccagaggactgagaacacctcagcaatccagagcagcaggtttctaactttgaggggcccaagaataaagctaggggcctgttaccacccccactccagagttagagcatgcagtccaggggtcctgaactgagccttgggccttaaaatcatgccagaaatgaacccagttgactgaactcaacttatagcaaaatcaaccacccaagggcatcaaagaagataaaagcaaacaaaacaaaaaacaactcatccaaaggacagcaacttcaaatgttgaaggaacattgcctgcaaagatgagaaagaaccaacgcaagaactctggcaactcaaaaggtggcagtgtgtttttacctccaaatgaccatattagttttccagaaatggttcttaaccaggcttaaatggctgaaatggcagaaatagaattcagaatatggataggaatgaagatgattgagattcaggagaaagtaaaaacccattccatgaaatcttaggaatacaataaaatgataccaggaataaagatatagtggccatttcaagaaagaacaaaactgatctgatagaactgaaaatctgacttcaaggttttcagaatacaattgcaagtagaatcaaccaagatgaggaaagaatctcagagcttaagacctcaaagctattttggttcttcaaaataactcagtcagacaaaaataaaatgaaaacgattatgaagaatgaggaaaacctccaagaaatatgggaatatgtaaagagaccaaatctgtgactcactggtgttcccgaaaggagggagagaaagtgaggaacttggaaaacatatttgagaatattacccacgaaaatttgcccaacctcactagagaggccaagattcaaattcaggacatgtagagaacccctgcaaaatatcatactagatgaccaatcccaagatgcataatcatcagattctccaagatcaaaataaaaaaaaaatgttaagggcagctagaaagaagaggcaggtcacctacaaagggaagcccatcaggctaatgacaaacctgtcagcagaaactatacaagccaggagaaattgggggcctatattcagcatttttaaagaaaagaaattccaaccgagaatttaatatccagccaaactaagcttcataagtcaaggagaaatacaatctttttcaaggaaggaaatgcaaagagaattcattaccaccagacctgccttacaaaaggccctaaagggagtgataaatatggaaagaaaagaccattaccagccactaaaaaacacacttaagtacataaaccattgacactataaagcaaccacacaaccaaattttgtattaaccaggtaacaatacaatgacaggatcaaaaccacacctatctatattaaccttgaatgtaaaaaggctaaatgtcccaattaaaaggcacagagtggtaagttggatagagaaccaagacacaactgtatgctgtcttcaagagtccatctcacatgcaatgacacctataggctcaaagtaaagggatgcagaaaaatctaccaaacagacacaacacagaaaaagccaggtgttcctattctaatttcaggcaaaacagactttaaaccaatagagattaaaaacacacacacacacacaaagaagggcattagagaatggtgaaaggcttagttcagcatgaagacctagctctgctaaatatatatgcatctagcacaggagcacccagattcctaagtcaagctcctaaagacctatgaagaaacttagataaccacacaataatagtgggagactttaacaccccactgacagaattagacagatctttgaggcagaaaataacaaagatatttgggacctgaactcaacactgaaccaaatggacctaacagatatctacaggactccccacccaaaaccaacataatactcactcttctcatttgcacttgccacatactctaaaattgacctcacaatttgacataaaacaatcctcagcaaattcaaaaacaccacattcataccaaccacactcttggaccacagcacaataaaaatagaaatcaatgcaaagaaaattgctcaaagccatgcaattacatggaaattaaacaaccagcttcttaatgatgtctcagtaaataatgaaattaaggcagacatcaagaaattcttcaaaactagtgaaaaaaaaatacagcataccagaatctgtgggacatagccaaagcagtgttaagggaaaagtttataacactaaatgcccacattaaaaagttagaaagatctcaaattaacaacttaagattacaactagaggaactagagaaaccagagtaaaccaacaccaaatctagcagaagacaagaagtaacaaaagtaagagctgaactgaaggaaattgagacacaaaaaaacacgcaaaattcaatgaatccagaagctgtttccttaaaagaataaagaagattgatatattattagctagggggataaagaaaaaaagagagaagatccaagtaaacacaaccagaaatcacaaaggggatgttatcactaaccccacagaaatacaaacaactctcggagactacttggaacactctgcagacaaattagaaaacctaaagcaaatggataatattctagaattgtacaaccttaagattcaatcagaaagaaattgaatcccaaaagcaatggcaacaaaagccaaaattgacaaatgggatctaattaaactaaagagctgctgcaccgcaagagaaactaccaacagagtgaacagagtgaacaggcaacctacggaatgggagaaaatttttgcaatttactcatctgacaaagggctaatatccagaatctacaaagaactcaaacaaatttacaagaaaaaaacaaacaaccccatcaaaaagtgggcaaaggatatgaacagacatttctaaaaagaagacatttatgcagccaatagacacatgaaaaaatgctgatcatcactggccatcagagaaatgcaaatcaaaacctcaatgagataccatctcacactggttagaatggtgatcattaaaaagtcaggaaacaacaggtactggagatgatgtggagaaacaggaacacttctacactgttggtgggactgtaaactagttcaaccattgtggaagacagtgtggggattcctcaaggatctagaactagaaatactatttgacccagccatcccattactgggtatatacccaaaggattataaatcatgcggctataaagacacatggacacgtatgtttattgcagcactattcacaatagcaaagacttggaaccaacccaaaattccatcaatgatagactggattaagaaaatgtggcccatatacatcatggaatactatgcagccataaaaaaggatgagttcgtgtcctttgtagggacatggatgaagctggaaaccataattctcagcaaactatcacaaggacaaaaaaccaaacaccgcatattctcactcataggtgggaattgaacaatgagaacacttggacacaggaaggggaacatcacacaccagggcctgtcatggggagcggggagggatagcattaggagatatacctaatgtaaatgacgagttaatgggtgcagcacaccagcatggcacatgtatacatatgtaacaaacctgcatgttgtgtacatgtaccctagaacttaaagtataataaaaatgtatacataaaaaaattaaaaggctattaacttcaaaaaaaaaaaaagcctaccaacaagaaaaagctcaggaccaaacaattcacagtcaaatttataacatgtataaagaaaagctcatattgctcctactgaaactattccaaaaaactggagaggagggactcctccccaactcattctattaggcatcatcctgataccaaaacctggcagagacacaacaacaaaaaaaacttcaggccattgtccttggcaaacactgatgcaaaactccttaaaaaattactagcaaatcaaatccaacaacacatcaagaagtgaatccaccatgatcaagtaggctttaactttgggatgcaaggttggttcaacacttgtgaattaataattgtgattcactacatacacagaactaaaaacaaaaatgtgattatcacaacagatgcagaaaaaggttttgataatgttcagtgttccttcatgttaaaaaccctccacaaactaggcattgaaggaacatacttgaaagtaatgagtcatttctgaaaatcctacagccaggataatagtaaatgggcaaaagctggaagcatttcccttgaataacagaacaagacaaggattccctctctcacctctcctattcaacatagcactggaagtcctagctagaggaatcaggaaagagaaagaaataagaagtttccaaataggaagagaggaagttaaactatccctgtttgcaggcaatatgattctatacctagaaaaccccatagtttctgtctaaaagcttcttgatctgataaaccacttcagaaaagtttcaggatacaaaattaatgcacaaaagtcagcagcattcctatataccaacaaatctaagctgagataaatcagaaatgcaatctcattaacaatagccaaataagaaaaaaattcctaggaatatagttaacccaggaagtgaaacatctttacaacaagaattacaaaccactactcaaagaaataagagatgacacaaataaatggaaaaacattcctatgctcatggttaggaagaatcaatattgttaaaatggccatactacccaaaacaatttacagattcaattctattcctatgaaactaccaatgacattcttcacaaaagtagaaaaaactattttaaaatttatatggaaccaaaaaagagcctgaatagctgagtcaatcctaagcaaaaagaacaaagcgggaggtgacacattgcttgactgcaaactatacttcaaggctgcagtaaccaaaactgcatggtactggtacaaaaacagatacctagaacaatggaacattacagagcccagaaataattaatgctgcaaacctacaactatctaatcttcaacaaaatcaacaaaaaaagaaacaatgggggaagggacttcctattaaataaatgattctggaataactggctagccatatgcagaagactgaaattgtaccccttccttaaaccatatacaaaaatctactcaagatgtattaaagacttaaatgtaaaacataaaactataaaaccctgcaaggtaacctaggaaatatgattctggacgtagaacttggtaaatatttcatgatgaagatgccaaaagcaatagcaacaaaaacaaaacttgacaaataggacctagttaaactaaaaagcttccgcacagcaaaagaaactatcagcacagtaaaccaacaacctacagaatagaagaaaatatttgtgagctatgtgtccaacaaaggtctaatatccagaatctataaggaacttaaaccagttaacaagcaaaaaacagacaaccccattagaaagtgggcaaaggacatgaacagaaacttctcaaaagaaaacatacatgttgccaacaaacaaatgaaaaaatgctcaacatcacagatcattagagaaatgaaaatccaaacagtaattgagatagcatctcacaccagtcgttataacataacatatgctgtcaaggttgtagagaaaagggaacatttatacactgctggtaggaatgtaaattagttcagccagcatggaaagcagtatggcaatttctcaaagaacttaaaacagaattaccattcaacccaagatattccattaatggttatatacccaaaggaatataaatcattctatcataaagacacatccatgtagtatgtgaatcacagaactattcacagtatcaaagacatagaatcaacctaattgctcatcaatgatagactggataaagaaaatgtggtatgtaaacaccatagaatactacgagtcataaaaaagaacaagatcatgtcctttgcagcaacatggatggagctggaggccattatcctaagcaaactttcacaagaacagaaaagaaaataccacattttctcacgtataaatgaaaactgaacattgagtacatatggacacaaagaagggaacaatggacactagggcctacttgagggtagagaatgggaggagcgtgaggatcaaaacacgaatcgagtactatgctgattacctggtgatgaaatacttctgcacacgaacccccccatgacatgaaatttacctatacaacaaacctgcacatgtacccctgaaactaaaataaaagttaaaaataaaaccccaaaattagacacacagtctgttcatgaggcttgatggaaacagcaggcaagtttatccactactggtgggattacaatatggtacaacccctatcaagggaaatatggcaatattatcaaaatttcaaatgcatttcacctttgtataagcaaatatacttctgggaatctggttcacaagaaagcaagctaagaaaggccacatgtggtatagtttgtaatggcaaaatattggaaacaacttgcgagggtagcaatgtgggtttattgaaagctaaggtagtctataaatgattcgctctgcagctttctctctctctctctctctccaagcaatcaaagaactagaacattactaataaccaacaacttaaatcaacccgtgtccttctcacccatccagaatgttttcttctctcgtttccagagttagccactatcttgtatgtcatttttatagttttttcattttttatgtatccctttttgagctttgcttcatatgtaaatatgcctaggcaatatatttcccagttctccttcatttgagttttatgacaagtgggtaattctaaatattgtcactgtggacttgtgttgtttattcaacattattttaattatggtcatattgtgcatggctgtaattcagttattttcataattgtataatacttccttgcattaatatgtcatgacatatttatgcattaatatgtcatgacatatttatccagtattttagtattggtaacatggactgtttccagtatgttattgttaaaaacagtacttttatgaacattattgtgcatgtttcttggtaaacatgtggaaatattttccttaattaaatctttaggagtgcaattgctgaattatagattgtgtacacattcaattttactagctgatgtcaaactgtttttaaatgtttcaccaatatagactctcattagtaatgcataaaagtttcttttctactacaaatcaataagaaaagataaacaacccattcaaatctaaaataaaagttgaaattaaataaataagtaaataaaaggtaagatacttgaattggcacttcacaaaagaggatagccaaatggataatagaaatattaaaaatgggccgggtgcagtggctcatgtctgtaatcctagcactttgggaggccaaggcaggtgcatcatctgaggtcagcggttcgagacaagcctgacca[133 bp omitted]gccattgaactccagcctgggtgacaagagcgaaattccatctcaaaaaaaaaaaaaaaaaaaaaaggagtattaaaaatgggtcagcttcaccagttattaggaaagtgtaaattcaaatcacaggaaatcccacaagatgtccacctgaatggctaatgaaaaggcaaatcatatgaggcattggtgagattatggagcaaatggaatgctcacacattgctgatagcagtgtgaattggtacaatgatgttggaaaattgattgcagtatttatgacagctggatgtatctatactctgtgatctgtactctgtgatccagcaattccattcctaaccatatatccaaaataaatgcatacctatgttctgcaagagatatgtacaagaatattcatagcaacactataatagctaaaacctagaaatatccaatgtatattgacagtagaatgaatatataacatttttggtatttttcatagaatactgtacagcagtgaaaatgatgaactacaggtgtagacttcaaaatggatgactctcaaaaatataatgttgagcaacataagcaggacatatgaacactataccttagatttcatttacatacaaattgaaaaagtatactaaactgaatatatatttcagaatacagacagaagtggcataactataaaggaaagcaagggctaattaccataaaatcttaggaagcagttatctctggggaggaaggagaatgaagcaactgaggagaggcatggagcatagatatagcaaatattctcctcctttacctggcagctcattttaatgctattctttaaagaatataggtattttctgtgagctttttatttgtttgtatggcttattgtacaatgagcttttgtgtaaggtagccaaaggcttccacagtctgacattcgtttatgtctccctcagtttcaggcttggtgggcatgtggtcagagtctaaatcgacaaggggtggggatttcaccagctgaattagtgtccaataattagtttgttaccttccctgccttaactccacctcaactcagtgactttcttaactcagattctgtccctgacaatacccaacttcaggatattcatttctattactcagaacttttggtaacaatgacagaatagtaagtcagactagctgaagcagagggctaatttattgcctcataacccaaccatgagaagggtgtgtgaagaactgctctcaaggtaaaggagggaaacctggctgtgtcatctgaatcttctctcaccatcacttctctccttgtctcagtgtattagagtcgtttttctcagacaattgatctccacccccagacttagataaccacttctggaattccctggttcatatatatcaccttttccagaagaaggaacccccgttttcccctttcattactcattcaaataaaatatgttaatagaccagaccaagtctcacacacaacacacacacacacactcacacacacacacacacacacacacccctacctgtggtcaggggtcaggctttcatgattagcagtccccattagactcacaagttgatggttcaaagagacaacaattcttcacaagaaacagggtgctgttcaaagaagtggggaggcatgctggacacacacactgtagatgtccaatgtatacatgatacatgttttctactactttctgattattttctccctaccactgtgatttcaagggcatcatccctcttcagacctagaattccaccttccaattactttcttgatgcatctgaaaggccgtctctgaaacagcaaagtgcaataattagtcattatgtattcaaggcaaatttgtcttacagagttttttgcaggaccagggaagaaggaaggaaatgcccagtttgatgctgggagtggtaaaatgataaagtagatctgggtggggtttgtagcaccagagcataatggagaaacaccttggttttgtaatcaagactggatctaccagtgacttgctgaataaccttcggtgattcctttctcttcttgggtctcactgtatttcaaaacatgaagaatttcattgtaatgttacctaataagtgagccagcacttctactctgtgagaaagtaggaaaactcttgggacaatcagagatgatgtgatgtaatgtccattagttcttcctgtgaataatcctgagggaaagcccccaggtccctcccagaatggggtggatatttcccaatacagctaaggaattatcccttgtaaataccacagacccgcccctggagccaggccaagctggactgcataaagattggtatggccttagctcttagccaaacaccttcctgacaccatgagggccagcagcttcttgatcgtggtggtgttcctcatcgctgggacgctggttctagaggcagctgtcacgggaggtgagtgaacaggtgacctgctgggctgggttggactaaggggagaccctctgggacaccctgggccaggacagggagcacttctgaagcagtaggcagcactggagcccagatttcagctttctgttctttgccatcatattcagaaaaaataggactttggctggtggactccacgtgctttccacctcagtgactgagatatcaggactgtttgtggaagtaatgttggtatgtggccttggcctcagatgtcaatacctgtgcagaatgtgcaataaaataatgaactccaggattttaaaccttgggtgtggacacagtcccccgtttctctgccccataaaagcactggagtaatcagtactctaaaaggaggttaagaaacaacaagccttcaggaatcatgttgtttgaggacccccattttataaggagggaaccaaaaatgtagaaatgagtgagcaattgccaaggtaattcccagagccaggatggggctcaagtctcctagtatgtggctcagggttctttcctactccaatgcacttcctaacaaatgacaatgtgtcctcttcactgctgggtgtcaccccagtctgaccactgctcctgagagacttggagtggaggaagggggaagaaacaaatactcaagggaactctggtccagtagaccaccccaaaaaaggaagagccttccaagagtgtagctcccagaggtgtaccttccctactcaggccatggtttgaggatgctgcagtaagcagtggatggacccagacccagaggaaagacatggcagctgaagcagaggcttactgggtataaatgtgggctcgtttcttcttttaacagttcctgttaaaggtcaagacactgtcaaaggccgtgttccattcaatggacaagatcccgttaaaggacaagtttcagttaaaggtcaagataaagtcaaagcgcaagagccagtcaaaggtccagtctccactaagcctggctcctgccccattatcttgatccggtgcgccatgttgaatccccctaaccgctgcttgaaagatactgactgcccaggaatcaagaagtgctgtgaaggctcttgcgggatggcctgtttcgttccccagtgaggtgagcactagctggagaacgaggagacccctgaagacacaaaagaaggctgagcggtggggaagcatcccaggttggtgggagggaggttgtgggaggtgacagaaagactgggagactgaggggtctgagaggctataaccagagtgcctagaaggatgatctgtcttcctcactgcctctgagtgctttgatgtgctgactctcacctctgatactcttctcttccacagagggagccggtccttgctgcacctgtgccgtccccagagctacaggccccatctggtcctaagtccctgctgcccttccccttcccacactgtccattcttcctcccattcaggatgcccacggctggagctgcctctctcatccactttccaataaagagttccttctgctccacttgtttctggttcctatgacttctgggctcctggatgctttggggaaatggatgtagaattgggacttcttctctccagtgaagaggggaaacggtcccatggtgaaagagagcagggcggggggaggaaacaggaggcacattgctagggcttcatattacaaatccaataatcagccccagtgctgccagctccttttcaccaggaaatggaaatatggaaatcttgcctttggccaaggaccaggaaaaacacaaaacacaaaaaataaataaacattacataaaccataagcaggtcttttttttccaatccaccatcagtcctgacctggctactgtcggccttaccagtgtgaccagccaacccttatggctgcaactacagctccccacttccttctcattaatgtttcccaggaatctatatcttttcaacaccacatagaaaggatgatgttacagatgctgcgaaactcctgctctttagaatttcactggtttatgcctgagattcctccatgaagtagcattcctttaggttaagcaatattctcttccagatttctgttttaagatgtgaatgaggaggcaagatacactaagtccttcatactatggtgtcagaggtttgggtgaatagcattctctggagacatacatgttgggggcagggcagacttgagtagtggagaaaggggcaggaatatgagcaacctcatggctctcctgttgacccactcgtcccactgcgattgcacaaggaaactctcagagaaggccacagcccccaggaggggagcagcctgggtgaaggggaataagcacaggcttgacagtcaggtgatctcagcactggctttgcctccccacgtattgggtgacctctggcaaatgtatgtcccccttccaggcctcagaggtctatttcagttgagggggtaaggtataattattctgcaaaggaaggtctaatcctgccactctgggatatgaaacagctcttctttgtgtattgggttcttgctctgagatgacatggggagcagaggcttggggtgagacaatgtggatccctgcaccactttgccccatccacgagcatctgagccatgatttttccctattgttcagaggctagtccgaacaactgtagggctttgacactagggtgtcttggagtacaggtgacagcagtacccaaacttctggcttgacaaatacaaaatacatcattggaggaaataatggtttctgttttttaatatttactctatttcctatacctagtagattacatgtattgtcacttatttttcataagtccctttcagatggccattatacatattttattttctaattttgtaaaaagattgaagctaagagagattaagtaaccattaaaagccacaaggttagtaagtgatagtaaatgatatttttattatatgctagcaacaatcagttagacatgctgcattttctattattaatatcaacaaaatcacaccattgctataaataaacaagagagaggcagagctttagaagagaaatctatgtaacttttcagaggcatataaaaatgcttgaatatacacatactcacaatacatgaatatgcacatatcacaatacatgaagactatgtggtgaagatgtcactatttactcaatatttaatatttatttaatttatccctaaggtgtattatacccaaaatccatttttaatatggtgtggttatggaggttaagggaacttgaaaccatacttaagtttatggggaagcataaattcttgtgaataggcgtagatgtttacaaatgaagattaaccctagggctctggaacctcctagacttaaaaaaaagttttgcaaagtaacaataatcaatatgttgtttttattagaagaatagtcaggttgagaaatcaatagaaaacaaaagaaaacccagaatcaggcctcattatatctaattcaggtaaagatcaatgtcaagttccaaaacaatgaagaaaacttgaattttttaagaaacaagattcagacggtaggttcactatttgcaaaaacaaaagaactaactctggtctgaattcaggcaaagattaagccactgagagagaaaaattgaaaggttccaaaaagacactttcttttcgctcaggaagcaggccaggatgacagtccatgcctagcaaggtagctgagcaactcaagatctcacagagaccagtggtttcttccatccaggatttgctgtggaacagagactgtaattcctttcatgttcagtcaggcagggacacatctcccaagaagaccctgccatttggaatagtcctctgactgcagtaggagagggtggagctgatactgggcccctcaggatctgctgtggcacagtggctggagatcccgatctcattggcttagaaggagtgcacatcttccagcaagttcctgcggagacgtaatagtttcctgattccagcagaaggagctgaagctgggaatggccccaccttgggatctgctgtgggatggaggctggagagtccatcttgttggccaagacaagtacatatctccctgcaagtctcagcaccgaaaggatagttcaattacagcaggaagtgtcagagctgagactggatcccatctcgacctgctgtgcaacagaggttggcaagcctgtcagggaggcttaggatcttaggctatgagatatgtgtgagtctccctctgggttgttgtgtgagcagctctgagctgggacctcagctgatgggggctggagctgaatcacaaggcaactttcagattcactgcccagtcagtgagcagaagggcctttctgccaaagccctagtgtatgtgattcattctggaccccacagcagatgggtttgattgcaggctcaaggccaaatgtaaccaaacccctgaatgggccatttctgggattgaactctggagccagctcagtggatcagccacgtgggtgttggtctgcactctcaatatgaccctccaaggtcttgggctccaccagagtttcacaaacttccccctgaatccagatccagaggctcccacagagagactttggactgtggatgagtgtagaattcttgtcattctggtgggacatgagcaggtgccttctatttcaccatcttggttatgtcattccttcctcagcagtttttttggtcgattttgcaaagctttaagttttacagtggggctggaaatagcaggagagtgtgagttccagccctgggatttgttgtttgctcccttttcactgacaggtattttgtatttttggcattctttgttttcaagttatgttgaggatgtggttttgtttagaaatttcttggtggtggtgttattttatacctcttggggtggagattgtggaagttacttattcttcctcttctgccttctattgtcttcaactaccccaaaaaaatctcctggaaactactctctgaaagaagttggagaaaaattattaatgcacttgaagaagatcaagaaaaaagaaagcgtgagtaatgttttgggtgagtttgaaagaagctatttttcttgcttccatttcattgcttccctctgcaataattccgggtgtgatccatgcattggatgtgtcctctagactcaaaccagatttcaaaagcagatatggggtaccagttctcctaacttcccaagcaatgagaggtgctgttactagggaagacagccttgtccaaggagtgctggaaccagacaagggcttggagacccaaggcctcaaagagagatacaaggccccaacatgtttcactttgctgtccctgcatggcctccctagagatattgacacctgattaacaaatcttgaatggcataaaggacaacaaaatgactgtggggagatgtcatttccctccttactttatcacgattgcacagacccctgaagggagaaatgcatttcctaatttcactcagtaagtcaaacccagaaaagaactggttctctgattcccagacatgggttcgttgtacaattgtctgaaaatagctgacttgatcaaattgtttcaaatgtaatttctataattccaattgatgcctcagtatttgtctcctaatacttggagtctttcattgttttccaattgtttagaatttcaaaggaaattattaattaatagaaataaggaattcacagcatgatgagggcccaatttgggagatgtgactttggaccaagtatctttttttttttttttgcgacatctaagcttggtcctgcccacctaggaggctgtgtaactgtgcagagaagggagtctttctacccacgttaacttatccagcttcaagtcccttccaggtaccctctgtcctccgattcccttctggaattcaggaacaggtagtactatgtcacctcccagacctaagtcttactcctaacagacctggataagttccctgttctcactaacctcagtaacaccatctggaaaagagaaggcctaagcacgtggagtttttgagcccctctaatagagcctccaaactacctagagcaagcttgtccaacttgtggcctgcaggctgcatgtggcccaggatggctttgattatggcccaacacaaattcataaatgagtttctttgtgattttttttagctcatcagctatcgttagtgttagtgtattttatgtgtggccaaagataattcttccaatgtgggccagggaggccaaaagattggacaccccaggccaggcgcagtggctcacgcctgtaatcccagcactttgggaggccgaggcgggccgatcatgaggtcaggagatcgagaccatcctggctaacacagtgaaaccccgtctctactaaaaatacaaaaaattagccgggcgtggtggcgggcacctgtagtcccagctgcttgggaggctgaggcaggagaatggcgtgaacccaggaggcggagtttgcagtgagccaagattgcaccactgcactcctgcctgggcgacagagcaagactccagctcaaagaaaaaaaaaaaaaaaaagattggacacccctgactgagagctttctaaggagaaatttgactatgtgggcaacttttgggaggaagtcagaagaaggggaaaaatgactggatttggggtccacctggcacatttaagtcctctaaaatgccatttgagtgagtcacagtggcttaatgagcttagcagacatcaagttttcaattacaagagaagacatatattctctgctctcctccctttgtttccaccatctggatccaataatccaaaacccagcagggttctggcttcttgtctgaggccagcagccctctgcttgtccctgaggctttatggtgattcccaagacggaacgatagagcagccactggtcagcctcaggaaaaatcaagccacttctcatgccctgtctagaactgagacagagagactctcctccaaccagtcatgtgggtcagccatctcaagggtaagcaggtgtcagccctaggaggtaaaaacaggcacctagtgtttatcagctcttagcatgtcccctgattacacagccttccatccaatttagaacaggaagtaccccttgacattatcacgaaccaccttctcacattaaggaggagaaaactgagtcccagagaggagaatgaaggtctttcagtcacagagtgctccgtagccttgctgggcctagaactaagatgtagcgctaacttcctaataaggtcactttgatggatccacttgatctgggccatgaaaggtggtccattggattgagcctgacagcctagagtgatggaacagcataaggtaatgtgtgaaagcaaaaacaaagagaagacactgcagatggaagcaatctggctgagataattttctacaactctgtgacaagtcagctattctcagtggaattttcagcacccccttattctctcattttaattatcttaactttctgtattttttattcttatctcacacgtttcaataaaatagctttatagtatcttttagcctctttcattgtggaaagggctgtaggagttttagagacaatctttctacctcattcatttttacgtttgttagaactgaattccagagataggaaagaatttgcctagtttttagcaaatccactgtgataccaaaaaaaaaaaaaaagccatggaaggccaggtgtggtggctcatgcctgtaatcccagcactttgggaggccaaggtggacggattacttgaggtcgggagtttgagaccatcctggccaacatggtgaaaccccgtctctactaaaaatacaaaaattagccaggcatggttgcaggcgcctgtaatcccaactactcaggaggttgaggcaggagaattgcttgaaccagggaggcggaggttgcagtgagctgaggtcgcgccaccgtattccagcctggtgacagagcgagactccatctcaaaaagaaaaaaaaaatgcaaaggaaacatgatgaattctgaacttgtatttagttttcagtgagatggtagaggtttcatattgattcagatgttaacctttccccagtgactgctttttaataccgtttgcttcctttcttattggattgtccagattatttcaatctatttgtaggagtgcttattatttaaatatgattcactatttgcttttatacattaacaaatatttttctggtgagttgttaactacagtcatgggtcacttagtgacaagtgatatggtctcagaaatgggttgttaggtgattttgtggcttagttatgcaatgcatgattttattcttttcctttgcttatatcatattttcccttccaaagattatcaatttttataaagtcaaatttttatcattctcaggaaatcctcaaatcagcattttacaaaaaaaaaaaaaacaaagaaaaaaccaaaaacctcaccagacttttaggacaactggagtcttggcggtccactctatgatgttcttgtatcttgcaccttgcaagagcatcataaggtggacttacaggaacctagatgtatagcttactacacagctaggcaatatggtatagcctattgttcctaggctacaaacctgtacactatgttattgtactgaacagtgtagtcaattgcaactcaatggtaagtacttgtgtatctaaacatatctaaatgtagaaaaggtacagtaaaaatatggtataaaatatttaaaaatagcatacctgtatagaggacttaccatgaatgcagcttgaaggtctgcaagttgattggtcttgtgaatcattaagtgaatggtaagtgaatgtcaagaactaggacattgctgtccattactgtagacgtaaacattatacacttagactacacaaaatttatttaaaagttttctttctgcaataataaattaaccttaacttagtataaaatctttatacacttttttatttttaattttttcactctttagtagtaaaatttagcttaaaacacaaacacattgtacagctacccaaaaatattttaaaaaaatccttattctataggctttcttccttttaaattattattttttccttttaaaacttttttgttggccagacatggtggcttatgcctgtaatcccagcactttgggagggcgaggcaggtggatcacgaggtcaggaggtcgagaccatcctggctaacacggtgaaaccccgtctctactaaaaaatacaaaaaatttgccgggcgtgatggtgggcgcctgtagtcccagctactcaggaggctgaggcaggagaatggcatgaacctgggaggtggaacttgcagtgagcccagatcctgccactgcactctagcctgggtgacagagcaagactccacctccaaaaaaaaaaaaaaaatacaaaaaaaactaagacacaaacacataatagcctaggcctgcacagggtcaggatcatcactatcactgtcttccacctctacatcttgccaggatcatcaatatcactgtcttccacctctacatcttgccacactggaaggtcttcgggagcaataacacatacagttgtcacctccggttataacaatgacttcctctggaatacagactgaagaaactgcctgggactgttttacagttgagttattttttaataagtagaggatggacactataataatgataaaaagtatagtatagtaattatagtaacatagtcgtttactatcattctgaagtattatgtactgtgcatgattgcatgctatatgtttatatgactggcagtggagtacacttgtttactccagcatcacctcaaacatgtgagtagtgccttgtactgtgacattaccacagctatgacattactaagtgataggaatttttcagctccattatagttttatgagagcaccatcacatatgcggttcgttgctgaccaaaacattgcctcatgctggagaagagtatccgagcatagttgctgcttcgagtcactccagggagatctaaaattccaggtgggagcattgtgtctactgagcatgtttagagatgggaaataatttgcctaaatttgtgatacaggaaatgaaatgataacatgataatttttaacttgtgtttaatgatgaacaaggcggtacacttttcatattgattcatgtgttaacattatttttccctgtgtactgtcttttcataccctttgctcttttttctactaggtgtccataatatttcaagtgatttgtaagagtgattcttatacaaagaaaacccaactcttgctctcatacatttaaaaatttttttctggttggttgttaaccattgttttagctagattatatattttaaccttacaaagtttttcaatttctataaagtcaaaatttttaaaaattcttacaaaaatattctccagttgggtattttaccagaaaaataaaaattcgccagactttgagggtagctagagttatggtgtccttgtgaatgtaaatctcccaaggtattcttataaagccatatcattacacagaagaatgagaaaacctcagaaacatcatttcttcagcaaaatctgaagtcagagaacagtaaaaacttcaaattatacagaaagaacatctgattttcaatggagagctctcttgaacttctgcctctacccttttcaaaggaaacagtggggtccagaaatatgtgtgtaaagaataggagagcctatgattgaaataaactcattcccaggaggatgtccacatatgaaaatacagagaaagagtcctggaggctcagagcatttgctagactttctgtgtgctggtgtgcagtccttgctgctgttaacactttactagggtgcatttgtcacaaggaatgaaccagtattgatacattattaactaaagtccagactttgttcatattgcctttgctgttaccaaggttctttttgtttcaggagcccatccaggacaatgtggattataattagtggtcatgtcttcttaggctcctcttggttgtgacagttgcacacattttccttgtttttgaagaccttgacagttttgaggagtactgctcaagtattttatagaatgtccctcaactgagatttgtctgatgtttttctcatactggggttgtggttttttggaggaaaacatcagaggtaaagtgcccttcttatcatgtaatatccagggtactgacttcaacatgatttactgttgatgatgttgacctagatgaccagtctgaggcagtgttcgtcaagtttctacactgaaaagtcaacttttccccctatccttgcatactatactctttgaaaggaagtcactgcacaaccatatgtaagatattccttaaaggggaagtatctaaataaattgtttggaattattctataaaaatgataattataattattgatgtcagataattgtttattatccctcatttatttacttactcaattgtttatttatatcagcgtggattcatagatatttattacatacattcgttataacttgttttgttgctgaaacagtaagaaggacgcttttgaacattaaaagccacaattctcagtaaagatattagttataagtatgtaagcactatatagcacagaaaacactttataaagaagaaaatatgagatacaccaaggagatatagataaaaacacagtaacagtaggagaattgaacacactgtattggtataagacaaaccaagtggacaaaaaagtaaacaaggatacagaggacacacccaggccttaaatacttatatcaacaaaaatgaaataagaagtgtaaataaatcaaattttcaacaaaagaagaaaaagagagaataaggccaaaaaaaagcaataataaagataaaagcaaatttttgaggtcaagaagagacaaacagtagctctaattaatagatttaaatgttgtttttgaaaaaattacaaaataggtgaaccatttgctgctatagtcaagatgaaaaggagtgaagaacagctaaataaaatcaagtataatggagggaatcaccaccaaaagagggaaaaaagaaagccctgagactcctttgtagaccaggttcctttctcacctcctggctgctgtgctgacccccaaggtcctgaggatgaggaggctgagcaagggacaaggccactggttgtcatctgtctgggcattgggtaagggctcctattctgtgtcttccctaacatacagcaggggctgtggatttcaaggatcatggtgaataatgttttagctttactaagcagggctccagacaaacatcataataattaaagggcagactctctaagtagcatgtctgcttagtcaaaagaagagatttattctaaatttttagcaggataccctgtcctgagtagggcatagttacacccaggaacgagaatgtgagtcctaccaccaggtaagccactgacatcagcagtgatcgtagctgaaggtgggagactttaaaatgagaatacaggagggtgatgatgagaaccagctgccacccacacaacaactgcagaggccacagctgttgtgtacccccttcccttccaccttcttatggtttatctcagagggagagcccatcagagcctgggagaagcttcccaaagtgtgtggagcccggatcccagcagtgccaggggtgcactgtggctgacagaggtactgcttggatgccccttcaaggagcaccttgttgcccagctgcatggagtgtggttagttaattgctgccagccactgctcgacctcaggcacaacctcagtttttgagctgagatcacacagaaccagggccctccagccaaaggcaaagtaaggctgtagtatgagattctacccttcatgcccaatgttgaacttctcttataaaaaaattcttgctcttgctcttgctccagagcttcctgttgggctgacagagatgttgtcaggacagtttggcaatggcatcctttgcctaatactgcttcctcacctttactttcacaggtgtgacctcacaaggcaacttgcattcttaactctgtctcagcccctgagaaccctgagcttgttggataacccaacctgcaaaacacagctcacagatttctgagaagcctgaagattcaggatcaggaccatagtaagatatgagtgtctaggtagcatgacaacagccagaaccacttctcaacaattgtgtgatgtgtacacagctgctgcagtcctggacactcatcactgccacccatgactctggaattgggtattgctgtggacaacaatactactttgttctgggaaagaatgccccttcatccttgcttctttgagtcactcaatggagattcaaggtgacatatgggaacattacatttgctgagcatgtttgtgcagccctaggcctcaggggtgaaggaaagtgccccctgttttgttctgtttttgcagtaggaacccagctctgtcactcagcaagtctcaaagatggccttaaatagggagatcccacaacataacaagggagttccacatagtggacagtcaaaagcatggacacatctcccataccgtggatcttcctagggttccaaactccccttgaaacttacacattggcaggtataaagtgaacagcacaattgttcacctctggaaatagaagggccactccctaatcaccatggaaatattcctaagaatgtgccttttcttattgggcagaaggccagatatctttttttatcagttttttcaatggcagtaatttatttcacaaggtcacctttaatgggcctgacccatttttctgcctatattttaatcacaggctgtatcttcagcttctccacactagatgataccttatcctcccagcctactgttcagtgtttttatgggcacgctcattcctcaacaatactggtcccacagtatttttctctccaatcacaacagagcataccactgctgcctccaggcatggcaacaccatgtctggccaccaacattgccaaattggacaccacttccactctcctcactggaaatagatgctgtagccatttatgccactgctgccggagtaaactctcacttcctaccacctccatgtctgcttttttctatcaccaattctcagtccattgcagtgtatacctctgactgtgtgaaccggtgcatatgcacatgtggaggctgccaagaagtcagagaaacaggcatgtggactttgcagcttctgctgggaatggtgtttgtaggcttagaggctaagacaggaaagttgcccacacaaccattctcatcccattgtgagcactggagcacctactatgcccctcctttccttcactctgtgttctagcctcagcttatgacctacagttttaatcaactgtaaaaaggcaatggagattggcaatagtagggacttcaccgcctcttgcctggattctctaatccacttacttccttgaaaaggcatttacaattctgtaatcatgaggggagatcaagaattatgagaaagatgagaagttcaggggctgcatgatattactgaaattacacagagactctaaaatggtaaatcaatgctcagaatttgcattgcagtcagaaaagatatggttattctgggatagctccactgctaccatgttcctcctagaggcacaatgttctctaacaaaacagtttttgctgagactggaaacactgataacatatttgcaggctgtgtgtgctccatgggggttgaaagcggggatcactaatgataatttttgaacaaccttcttaggccttccttgtccagtacctcctgggatggggacactctgttctagctagccatgtgtgtctgtcttttggagtccagagtgataagcgtcatgcacaagtaccaggtgcttctcagcttgtaacagattccaacttttcttgaatttgaagttggaaactccctttgaaatatccagacaaaaccccccatcttgtggatgggaaaaccggaatccagggatccatcaaagtttaatctagaaatcaggggcagagctggggctgggaactatctgttctaatatgatgtcattccctttggtagaatgttgaaaaagcaggaggattcattagcctttcaaaaaagactagttgaggggttaatttgccaaaaagcacagtgacaataggaattccaggaaaatagaataatccaagccaaaatgtggaatcaaagaaaaatatagatttgaggagaccccaaagaagtcagcaactcaactataaagtaaccctccacaatatgctaattctgccaccatccaggtcttccgcatcaccttggtgttctcacttgcggtgtgcccactgcacgagctttctgctattctactgcacattcacagctcacttggaagaaactttagtaagattcttggaatctttctcacagcaggaagagtcctaagagaccgagctactccttttacaataattgagacacagaccgctggcaaatgaaatttgccccaaatttggaagaccatctcataggcatgacaacaaaagactcatgtgtttgttttaacttggtgtggttttttttaattatgggggtagttttatttattttcaaatatgtagtagctacttgcattactttttaataaaccacatgttcatggtctatgtttatttttctatgagaagatctattttccttattgtgttttaaaaattctttcaatatattatagaatatctctattcccaccatatgtgtttatacattttaaaaatttctgttttcttactgtatgcatgattttccctgtaaaactttttatttgcttgtagttaatgatattaatttacttcagaaaatcattcacgtgtaaatattctacaaaacttgtctcatgtttactttgaatacttttatagttcgatctttatgtttaaatccttgaccacctaaaacgtactttgaaataatgggtggagtggaaatccagtatttactccttgaattgccggtaatcagtctaaacatcattcgctgaattactaacatttcttaagtgatgtggaattctgcccttatcatttgtaaaattctcaaaggcattgagtttatcttttattccattgagatgtgtgcattttctcaccattaatgtatgttctaattatgttgacatatttttgtgataattttggtggaattaaaatgtgtcatgggtaactctcccatgacaatttatcatcaatattttcctggaaaacctcaaatgcttactttatcagttggtatgttcaatttcattaatcattggatttttatctcatgggcttccaacttactcttcattgtttatcactaaaacccactaaaatctccatttttttttttttttttttgagacaggatctcgctctgtcgccaggctggagtgcagtggcgcaatcttggctcactgcaacctctgcctcctgggttcaagtgattcttctgcgtcagcctcctgagtagctgggactacagttgcatgccaccatgcccagctaatttttgtatttttaatagagacagggtttcaccatgttagccaggatggttttgatctcttgacctcgtgatccgcctgccttggcctcccaaagtgctgggattccaggcgtgagccaccacgcccggtctccatagtttttaagagcgccgttaggctggatattccttatactctgttcctaatactgtcagttccttagggaggactttggagctctctattcttatagcctgcctctcacttttggaaaatcactgagttccttctaaggagctgttttggaaagagtggttcacttttctcagagtgacagccctgctttaccaactgggctctgaccatgagccagaacatcctctgatgttgttggcaggcattcactggcatgaaaattctgcctggcaaatgagctgtgccgagggctatgggggtctcagcattcttgacctacaatgcctgggatagaacctctccactacaagtagtgttgggtggaagaatggagctctgtacctcttcatcacactcacctggaatctctgcaatacaaccttggaatgggtttgagagatgctggcaaccttttgcctctggtgagatatcataaccctttaaagggaagtgagaggaaagagactctcccattacttggctagatgtgccctgagtgaagcttccctcatattgagctaggatatagaaagtatagagtgggttatgactcaaatgctgtagacactctgtgttctttcaaggtttagtagagttttaaaaataaatgtatgcacttaagacaattcccaaagacttcaagtggctgttttaaaaaataacttttatcaagtatgattgtttggtttgagggtatttccatggatctccttacactgctattccagaggagaagccaccaggtcactcaactcttagtatcatctactggaaactggctaagacagtatttatgtgcttctctcacaataacaggaagataactatatcacacaatggatatggcagttggcttgactgcagtaatcatttaactatgtatatgtatatcaaaacatcatgttgcataccttaaatatgtacaataaaaataaaatctaaaagaaataaaataaaaataactttcaccagctgtggttgttggtttggagtaatccaaggaactcttcacaccattccctagcaagacttgcccaattattttcttcttaatttcaaagaagtctatttggctctgtgaaaatacaagtatctgactggttcacaaaaccactaggaaacctagaaattcaagttaaaagaaaaggcaaaaacaaagaagtcattgaatgcagaatcacagtcaaaattagtcagatattggcctttgtggagctcattggtgctacctcagagtagatggaggttacacatctctcagccaatatgccaaagccagatgctcttcaatgcatgggccatcatttccatttctcttctgagaagtcaaatacagctgccattgctgtaactgccccagaaatgaatcttcacctcctactatcactagctcccaagtgcagcccagagtttgtgcatctgatgatctgaacacggcatgtactcacataaggttgtctctcagtggaggcagggaaaacaagtgtccagactttcctattctgttataaaaagtggcagagcctctggatttcagggcttatgtggttaattcccccaaaataggaatgacattcttatgcttagaagccaagaaatgtctacaacacccacactcattacatcttgagtcctggagcaaggaacactttgtattttcttctcgcagattatattctatgtagccccatctgtgctaccaactttctgtaggatcttggacaatcactgtctgcttctgatgctcagaatacctgctagaaaaaaaaataaaataataaacaaaaaaaataagaagggctttgaggttagtgggccctctgtgcattcatgactatgatattccttgattatacagacacttatgcctcattcaggcaactatggattctttgttgaggacagatgaagaagggaaagaaagatgaagggttctgggaccacaaaaactgttttaaattaccaagagaaagcagatgcagtattctatgagatttgtgagtagagaagccagaaagtattattttaggcacaactcaactgataccaccctccaacaaatacctggagtcctctggcaacacagctttactgaaccaaggagcccagatagcatctctccaggctccggatgcaccccagggatagagcagtgaacgtcacagacgacctcaggtacattggagccgctctccagggccttgcagactcagttctagccagccatttgtgtctgtccctaggatcacagagtgtccaggagtcaggccaagccaggccctgaattctttccagattgtaataaatgtcctgagtcataatcttccattgaatttggagtcgaaatacctgctgacatatagaaaactgccctcatctaacaaaggggaatattgcttaggattgaggagtaaagctgaaaatgaaaaaaatcagtcctgatttcaagtcatttttctttccataggatgtagactaagacaggaagatgcaagcatcttgctcataaaaccattgttccatcagtttggcctgacgctgggtgagaggggtagggttataatagaaattccagaccaacagaacaatataagtcaaagtgtggaattacagtaaacatattgatttcagcattatttatgaccgcaaaatgttgggaacaaccaaaatacccatacagaaaagagtggttgtataaatgatagtacaactataaaatgaagtactgtgtagctattcaaaggtacacggaagatgtccatgaactgatgtatgttaattataaatacattgtggaatgataaatttaaagtgtcttataacaatgaatacaaaataagaaaatatccatttacctactcattgcaggaaaaaagaaaaaagaaaggaaaaacccagagaccaatgagagtggtcacctatgtggtcaggaattggtagaaaggaaagagagaatggagatggatatctgattcttctctgaatgtacctttatgcacagatctgactggggagccatgtgaaaatttcacatactcggatgaataaataaatgaataaaccccacaggattgagagataatttgtaatcaaatacaaactatttgtttgacaaaccaaccagcaaacaaataaaccatagatatgagaggaccatgaagattaaagaaacttccatttgcgaaaccattataaaacgtaatgaagatgaataaacactcattacagaatatcaaatcaaccattatcatgaggttttctttttttaatttttttattttattattattatactttaagttttcgggtacatgtgcacaatgtgcaggttagttacatatgtatacatgtgccattctggtgtgctgcacccattaactcgtcatttagcattaggtatatctcctaatgctatccctccccactccccccaccccacaacagtccccagagtgtcatgttccccttcctgtgtccatgtgttctcattgctcaattcccacctctgagtgagaatatgcggtgtttggttttttgttcttgtgatagtttactgagaatgatgatttccaatttcatccatgtccctacaaaggacatgaactcatcattttttatggctgcatagcattccatggtgtatatgtgccacattttcttaatccagtctatcactgttggacatttgggttggttccaagtctttgctactgtgaatagtgccacaataaacatacgtgtgcatgtgtttttatagcagcatgatttatagtcctttgggtatatatccagtaatgggatggctgggtcaaatggtatttctagttctagatccctgaggaatcgccacactgacttccacaatggttgaactagtttacagtcccaccaacagtgtaaaagtgttcctgtttctccacatcctctccagaacctgttgtttcctgactttttaatgattgccattctaaccggtgtgagatggtatctcattgtggttttgatttgcatttctctgatggccagtgatggtgagcattttttcatgtgttttttggctgcataaatgtcttcttttgagaagtgtctgttcatgtccttcacccactttttgatggggttgtttttttttttcttgtaaatttgtttgagttcattgtagattctggatattagccctttgtcagatgagtaggttgcgaaaattttctcccattttgtaggctgcctgttcactctgatggtagtttcttttgctgtgcagaagctctttagtttaattggatcccatttgtcaattttggcttttgttgccattgcttttggtgttttagacatgaagtccttgcccatgcctatgtcctgaatggtaatgcctaggttttcttctagggtttttatggttttatgtctaacgtttaagtctttaatccatcttgaattaatttttgtataaggtgtaaggaaaagatccagtttcagctttctacatatggctagccagttttcccagcaccatttattaaatagggaatcctttccccattgcttgtttttctcaggtttgtcaaagatcagatagttgtagatatgtggcgttatttctgagggctctgttctgttccattgatctatatctctgttttggtaccagtaccatgctgttttggttactgcagccttgtagtatagtttgaagtcaggtagcgtgatgcctccagctttgttcttttggcttaggattgacttggtgatgcgggctcttttttggttccatatgaactttaaagtagttttttccaattctgtgaagaaaatcattggttatcatgaggttttctgtactcctttggtgtctccatgcacagtgatcccaacctcatgtgctttgtgttgtgctcttgcaaattctctcttcaccaggcagagggctttgcttaatctgctagtccttgccacagcaaggacttcaagagactacatagtcccattttctcatcttacaatatctagaactgaggctggagatagaaggaacttgcccagaatcattactgggtaatcagcctcataagtgaaaagacaaattatactttatttaacttgcagtccttgaactatgaatgaagctataattgttttcatacatgcattaactgtttgtattataatttctctaaatacctgatggagctcatatcttacactctttattagatgatatgcccttctttatcacagtgaagaaattttttcaatatgctatgaaattcaccctttatctgatatatgtttattaatgttttccattttctgttcattactttttctttatctatggctggttttgcctcacaatttaaacatttttgtatagttttaaatttttttcaaattttattttagatacagggggtacatgttcaggtttgttacatgggcatattgtgtgatgctaaggtttggggtatagatcccatcacccaggtagtgagcgtagtatccaatagatagtttctcaacccatgcccacttccctctctcttccttctagtagtctgcagtgtctgttgttcccgtgtttatgtcagtgtgtgttcaatgtttagctcccacttataagtgagaacatgtggtatttggttttctgttcctgcattaatttgcttaggataatgacctccagctgcatccatgttcctgcaaaagataggatttcattctttttatggctatgtagtattctatggtatatacatgtcatattttctttatctaatcaaccatttatgggcacctaggttgattccatatctttgctattgtgcatagcaaagcaatgaacatgagtgcaggtgtcctttttgtagagtgatttattttccttttgggatatacccagtagtggaattgctgggtcaaacggtggctctgttttaagttctctgagaaatctccaaactgctctccacagtggggctgaattaatttacataccaactaaccaaaggggaaagaagatataagcattctcttttctccacagcctacagcatctgttgttttttgactctgaaattacagccattctgcaacagtcccctctggaacatcaacccagtggcctgagaactgttcctgtaccccagcacccacaggggctgctgctttctctgaattggaagactcagagtgcaaacctgcctgacccagcccccacctggctttgttctgccacctgccctggtagcttaatacaaaaaacagaaactcttggaagctctatggccccaactattgcctgagaaaccagagggcaatctaaagcaagcaaaaatcccactgctactaccatagctggtgcttttttgcaagcaccacctccgggctggaggccaaccaacacagtccattatagcatctcccggtagaataacactgcacctaggaaggagaaaatggctgaggaatctcagctatcaccactgcctgtacccctctgactaaccaggaggtactgattctgtccaagtgaccagttcagtgctactataaccagtgttcaagaaaaccaacacactaaggctatcaataaccaaggaatctcacagagtctgcatcactcccctgctaccctcatgactggtgtggctacccactgctgggagacttgaggacaggccacatcaccagatctcttgcagacattccccagtactggcctggagtgtggcaacttcactgggcagctagatccagaggagcatttgagaattctcagtgccctactctaaaagagtttgctgctatagtggcatgacatttttaggggtgagcttgcagggttatttctcaggtcagggttgtgtgcatgcagttggtggatcacccagttgtggtctggctcactggcattggaaccagggtgccatgataccaacagggaacatgggtatatgtttgctgggccagcatgaggcatgcctgccaggagtggcatatgtagctgtttctcagtctcaggacatggatgcacagctgctcagatagcctgaggtcacgtctgtcaggagcagcccactgggctgtttctcaggccgaagacatgggtacaaggctacttgggtagcctagtggcatgtctgctggaggagggaacagggctgcctctttggcctttgacacagctgcatggctgcttggctagtctttgggcatttctgtgaggggtggcacaagaagtggttttgttgtcccagggtccaagcatggggcttcttgttaggccttggggcatgcccaccaaggcagactgtggagttctttctcagtggtgagacaaaggcccatagctgcttggctggcctgggcatatccaccaggggtggccattggctgtttctcaagtttgggacatggactctttgctacttgggcagtctggggtcatgcccactaagggtagcttgtgggactgtttctcaggcccttatttaaaagattgggtcactgggcaagccatggatgtatctgtggagggcaagggtgctgcagggctgtttctcaggtattgagggaggaccatatcagctgcttggagctcaggggcccctcctgcttagtagagggtatgtggcagtttggctagttcaaggacaggcttacttggtacgactggacaattattccccagctgaaatgcagtggcatgagttggtttccctgctgtgccagaatagagtcacagccaatcctgggctcgaactctgcacagctggggttgtggagttcagccactatgtgaccttggcgtaatgaagatggagcccaaatgctggagaagtgtggttgtcagaagttccagaggaggctacactccagagggggctctgttgtcaagatgggactgtgctgcggcagcttggcccaagtgggtgagtgggatgtgggtagtgcacaccttgtgcccctaatgcagggcaatacagctgtgtgaattcccagcagctctccaaactgggctcaggactttaaaggactgtgggattctcctcttgtaaggatagtacatgtttgcagtcacaaggtgactggtggggaccttctccttacattttccctgcaacaggaagaccctcttggctccagacagatctgatccgagtggagggagacaggactgcaaaaaccagatgcctctgcactgccctcctgaacttctaatcaccacggttcatctccactcccccatgcactccagcactctccctttgacactccaaccaaatcttagctgtttgttaccttgaccctttattctggtggggatgagcaccatgggtctctagttatccatcttgctgactgccaaattttctatttcttcatagttaaatcttgatagcttacaggggtctaggaatttatcagtttcttctaggttatctaattgttagtatatagttgttcatgagtctctaatgatctttgcatttctgtggtatcagttgtaatgtctcctttttcatctctgattttatttaattgagtcttcttttttttgttttacttagtctagctaaaagtttggtgattttgtttgtcatttccaaaaaccaactctttgttttattgatcttttgtattgtgtttgtagtctccatttttattatttctactatatccgtatgatttctttccttctagtattattacaattagttttctcttttctttttcttattacttgtggtgccacattaggttgtttatttgagattttttttcttttttgtgtaggcatttattgctgtaactttctgtcttagaactatttttactgtatctcatagcctttgatacattgtgtttctactttagcttgtctcgaagaaatttttatttcctttttaatttcttctttgaccagttggttgttcaggagcatgtagtttaatttccatgtatttgtgtattttctgaagttccttcttttattaatttctagtttgatagtaatgtggtcagaaaagatacttgatatggtttcaatcttcataaaaatgttaagacttgttttgtggcctaacatataataatctattttggagaatatttcttgtgcagttgagaagaacatgtgttctggagttgtttaataaacttttctgtatacgcccttaaagtctatttagtctagagtgcagcttatatctcacaggtctttgcagattttctgtctgggtgatctgtccattgctattacagggttttgaaatcctctaatgatatagtttggatatccgtcccctccaaatctcatgttaaaatgtgaccatcagtgttggaagtgcagcctagtgtgaggtgtttgggttatagggctagatccctcatgaatggcctggtgctatccccgcagtaatgagtgagttctcactctcttagttcacatgaagactgcttgtttaaaagaccctggcatctttctttctccctctctcaccatgtgatacactggctcccaatcccttccatcacgattaaatactttatgtggcatcaccagaaactgagcagatgctggcaccaggcatcttagcctgcagaactttgagccaaacaaacctcttttctgtatacattctctagtctcaggtattgttttatagtaatgctaaatgccctaaaacacctactattattgtatgcagagatctctcttcagaatatttgctttatatctttaggtgcttggatttggggtgcatacgtacttacgatttctgtattatcttgctgaattgacctctttagcattatataatgatcttctttatgtctttttacatttttgacttaaagtctatttgatctgatataagtgttgctactcctgctctcttttggtttccacttgtgtggaatgttttttccatccattatcgttcagtctatgtgtgtaattaccagtatggttgcctcttttaggaagcctattgatgtatcttatttttttcccattcatccactctaggcatttaattagtgaatttatttaccttcaagataattattcataggtaaggacttactactgccactttttcattgttttctagttgctttggtgattctttctttctttctttctttctctcttattgccttccactatgattaagttagtttctctagtagtatattttgatacttattttttatttttagggcgtctattaaaaatgttgtctttgtggctaacatgaggcctttaaaaaaaatcctgtagctatcacaagtgattttaacctgataataatttgtttgattacaaaacataaaactacaccttaccaccacttccctccccgcattttgatattttcatgtcacaattaacagcttttatgtgccatatacattaacaatttattgtagttattattaatttcaagttttatcttttagccttcatactaaagatagaagtgatttatacatcaccattatagtatcacagtattctgaattttgactgtgtaattaattttattagtgagttctacacttttagattattttgtattactcattagcatccttttctttcaccttgaagaactcctttagcatttcttgtaaaataggtctgatggtgacatacttcctcacctttgtatgtctaggaaagttttcatttctctgtcatttctgaagaacagctttgctgagtatagtatgcttggatggttttcttttttttcattactttgataatattattccactctcctctgatctttaatgttccctttgagaaatatgatttgattgcagcactattcatactagcaaaaacatggaatcgacttaggtgcccatcaatggtggattggataaagaaaatatggtgtatatacaccatggaatactacacagtcataaaaaataaataaaatcatgcatttgcagcaacatggatgcagtgggaggccattatcctaagtagattaatgcaggaagagaaaactatataccacatgttctcagttatagaggggagctaaatgtcagatactcatgaacataaagatggaaataatacacactgaagactactagaggagagaaggagggagggaaggggacaagggttgaaaaactaaatgttgggtattatagtcagtatcagaatgacaggaaaattcataccccgagcttcagcatcatgcaatatacccaggtaacaaatttgcacacttggcccctgaatgtaaaataacagttgaaaaagaaaaaaaaggtctgatgtgaagtgtattggaactgttttgcattttatttgcttcttttcttttgctgcttcagtatcatttatttgtctttgatctttcacagtttaattattatatgtctagtcttttttgaattgaatgtgattggtgactgttgaccatcctgcactttgactacatatatatatatataatagacacatacatatatatataatatatatgtatatatgtatatgtatatatatgggtgtatatatgtgtgtgtgtgtgtgtgtgtatatatatatatatatatatatatatatatatatatatgaactcctcagatttggaaagttttctgttattacttatttaataagctttctttacttttccatttatctttctctaacttctcttgaatgccagtaaattgtccctttgctcacttaatgctattccatacatctcataagtttccttcattctattcttttttcttttttccttttctgagtatatattgtcaaataacctgtattcaagctcacagattattccttctgcttgatcatttctggtgttaatgcactctattgcacttttcacacttttcattttattcattgcattcttcagctcctatattaacattagatattaaatgttatcatttttaccctttgttacatctctctttctggtcacttattgttttcatcatttcatttaattatttatctgtattttattaaagttctttgagcttccttagaacagccattttaaattctctttcaggcaggtcatacatctccatgtctttggggccaatcaatggtatcttattttgttcatttggtaccttattttgttaatttggtgtcatcagttttccccgattgttcttgatccttgtgattgtgcattgatgtctgcacattgaagaagtaggtacttattgaattgcaggtaggtacttgaatgcagatattgaatttaaggtaggtacttactccagtttggctttgtctgagaatgtccctcaactctgtccggaaattctaggcagatcatctgttctaggtttgtaagcctgtgactgtttcagtcattgcagcacaaggagatgtcataaacccaggaccaccatggccagttctgcaccaggctgtaacccatggctgcagaggctggcacaatgatggaatgcattcccaactcctcctcactgatacctgcctacgtatgttggttattcataatccaaggctgctgtagttggctgccagtggtacaggtaagaacgcaagtctatctcacaggaactatgtgttcctctctgctgctggggcaggtcttgctgcttaggccacaggtattcaagcagggtcactatgggtgtcctcccagtgctgaattttactattatagactagtattttgttccgtgaaaaagtccaagccttacttcattcccttccccccaaaagaaagtagctctctctgcactgtgctgcctgtgattgggttaggggtgatacaggaaacaaaattgtctttcgtgccctcttcaatgtgtatttttaattattatactataatcaggttctgtaatatctcatctggcctgtttagcttttgagaaactattatcatatgtggataattattaaattcgacgttttggagggtataatctctggggagtcctactctaccaggtttttctgcccattccccaaaaataactatatttgaatcttttctaagttgtaaagtgatttcccatagaattgagcaaaatacatttaagtcctcctgttttcttcttttcctatgagtataaaactttcagatttttgtgccaatttagtgcactttaatatttttgcattttttatttgtccaacaggacaaatcatttgatcacttaatcttttcccccatcataattccatatctaagatgtatgcatcaccataccatttttatgctttccaaatcactgatttctgatttcaactttatcaatacattcctttatcatttggaaatgtttttttccacatttcattgaattcaattctaatatgaatatagtaatcacatgttttgcttggattgcattttcctggtttgtttttgcaaatattgtgcccttttgttttatctgcatcttttggacactagatgagatgaaagttttgttcttgatccataagtaagattaatatttcagactctattttgtatcagtaagtttggaacagaacagtttctggtattttcttaagggaagtgtgaggaagattacagtggttagcagacacagtaatcaattttagttcagaacaatatcaccttactctgttggggtttctgcaataaggaactacttactgcctttgaggcaaacagataaatttggtaagatctcagagtggctcatagagaaaccatgcagctcacatgatttatgtttgatagcatagcactttttttctgtggttggcctttctcttttccccttccatagagcattgcctacaggaaggttaagattctaagacagaataattgaaaataagttttcaagctatcctttccccagcactaccctccaaggtgttctgaatgtacacagggacactgttgggatgctttcttcttctcctgtggtctgctcataacgaagtctttatgactcaaagtaaagaaagtttcttcagacttttcaggatgtcatcacaattggaaaaatctatgcttctaccaaaggtgggaattttagcttcatgtccactcacaatacattattcaattcattgatggtggcaaatatttctcacagcctgtttggggattcagctgtttactactgaagtagaaacttctcttaattaaaaagaaaattctgctgtttaggtagatttcatgaaaagaacccaatctagaaaccagcatttttactttttttccaacagttgttcctatcaccatgaaagcatattaaaattctttcatcctttgaaaacacatctggaacttacctcaccctccagatacagcctcagctctcactccaccatgaattcagacttcctgagaaggttgcagctggtctccatccttcaactgacaacccaatgcaattgtattcatctctcattaaagttactagcaacaactaagaaaaactttggatacatgtcagtctttattgtgttgaacttgacagacatatttgacattggagtgccccatttacttgtttaaaatttctttctttggattccataacgtttcattatcttctatatcattggacttctatgattgctcattcttaggtaaaatagaacgtgtctcaagatcatttttaaaacaaaaggaagtatggagttctatctaaaatagagtatttaaattattgcatcatgaagggaaactcacatttagaatataaaggcattctcagaaaccaattgcttttgtagcctgaagccagtctctttcctacttttgtctataattctgtaaaattaaagtgatctggcatgatgatctaaaaggactgataaaaatttgctggggctgccagaagaaagaaaatgcctttgacattatgttgctggggacattgactttgtcccacactcagcaggggtgaggaagttggcatttactgataagctaagaaaagtcagtgccttttgtaatttaagctccacccatggcacactcactcaaggaagatataaatgacaaggtcggctcagctctcagacaaggttttccaagcaagatgaagcccaacatcatctttgtactttccctgctcctcatcttggagaagcaagcagctgtgatgggacaaaaaggtgagtggagagggtaagccttggggaaagctgctcagacagctaataatctaagattatttggggtgcaaacagtaacctgtttaggcacagattcttctctttgaagagaattgattttctccacccaaagcttcagcttttctagaaatatcaataatttgttgggggaaaagtggggggtaagagttgtaagggagctttggagataatgaatgcataccttcttattatcaattaccaggtggatcaaaaggccgattaccaagtgaattttcccaatttccacacggacaaaagggccagcactattctggacaaaaaggcaagcaacaaactgaatccaaaggcagtttttctattcaatacacatatcatgtagatgccaatgatcatgaccagtcccgaaaaagtcagcaatatgatttgaatgccctacataagacgacaaaatcacaacgacatctaggtggaagtcaacaactgctccataataaacaagaaggcagagaccatgataaatcaaaaggtcattttcacagggtagttatacaccataaaggaggcaaagctcatcgtgggacacaaaatccttctcaagatcaggggaatagcccatctggaaagggaatatccagtcaatattcaaacacagaagaaaggctgtgggttcatggactaagtaaagaacaaacttccgtctctggtgcacaaaaaggtagaaaacaaggcggatcccaaagcagttatgttctccaaactgaagagctagtagctaacaaacaacaacgtgagactaaaaattctcatcaaaataaagggcattaccaaaatgtggttgaagtgagagaggaacattcaagtaaagtacaaacctcactctgtcctgcgcaccaagacaaactccaacatggatccaaagacattttttctacccaagatgagctcctagtatataacaagaatcaacaccagacaaaaaatctcaatcaagatcaacagcatggccgaaaggcaaataaaatatcataccaatcttcaagtacagaagaaagacgactccactatggagaaaatggtgtgcagaaagatgtatcccaaagcagtatttatagccaaactgaagagaaagcacagggcaagtctcaaaaacagataacaattcccagtcaagagcaagagcatagccaaaaggcaaataaaatatcataccaatcttcaagtacggaagaaagacgactccactatggagaaaatggtgtgcagaaagatgtatcccaacgcagtatttatagccaaactgaaaagctagtagcaggcaagtctcaaatccaggcaccaaatcctaagcaagagccatggcatggtgaaaatgcaaaaggagagtctggccaatctacaaatagagaacaagacctactcagtcatgaacaaaaaggcagacaccaacatggatctcatgggggattggatattgtaattatagagcaggaagatgacagtgatcgtcatttggcacaacatcttaacaacgaccgaaacccattatttacataaacctaccattcggtaaccatgtgaaaggatggaccaatatcaaggtaatttttttttagcaaataggggagatatctctctcattgtttagaattgttggggactctccaggacttttgtgggattgataaccattgttcgcaccaatagaagtgctgtataacaagtggtaggaagatgagcctccccattccctggtgaggagagggtctggtagtggcacagaaggatgtttggcctatcatgaggtcctagaattcctatccttaattgaatattcttcaataatatttttttgtatatgcctacctgctaaaggtttttttgaacaggtactgactacatatgcatatttataagtttatggtatactcttgtcagttcttatactttagattagtaaacctcagtttctttcctatatagtataaaggattacagccattaatgttttctttctgcacaccagtgaatgttcttgcatccctgttagggttcatctatgctccttcagagaccacaagcccaaagactatcagtcctccctctcagaatacaggaaagagatatgtagaaagatccttgttcatgttgtgaaagagaagatggaaagggagacacaagagatggtgagggatctcatgggccaattgggtgtttacaacatcaggagaagaaaactgaagccctgagaggggtaatggtgcttccctgcctctttgcagtaagtaacactgcacttgaagagagggcaagcagtagaaacagtggccccagctggcaactagtggcctggtatcctagtagtagagggctggtacagttggagctgaaggggacagggggcccagctaccatccccacccttcactttttactatactcacatcactgattctcttctttctctctaggtgtcagttgacctcagtgaattctgtgatgtttctgagatgcagactcccgtgtagtttcagattcttggtccatggatgacaccacctgcccatgcttccttgaattaggctttcctaacctgaagcgccttcaaacttccaataaagagatcattttctgcttcatctgcttttgactcctgttttctctggattcctagtggctcaaggggttgagggcatttctaatgtaagtggttttgaaagaaaataaagggatatttttgaagcactagggagaatagtaatcaaagccacatttcaagatatattgatagaaaccaacactaaaaatagggtgctgttagtctaccagtcacatgtctaccacctgaggccaacactaaaggctttcatgaccctggtactaataagaccccaggaactaaaaatatcccagaaagacaagagaaaatgtattgcaacaggccctgggaaagtccctgatctgctggtgatcaattccacagtagcacatcccttcaattagcttaagaatgtcttacgcctacagtatccattgagatgcaattacaccaaaggtgatatgttaaatctgcacaacttcagtaacagcaagtgggttaaaatgtcacctgtggatggaaagaccagatgaccagtcaaaggaatcttgaggcaggtggtgtcttcataatggaaatactgctgcctatactgccttttccccctctattttaaaaaagtttccagagaaatctaaaccttcaggagaagaggccaacataggggagtgagaaaatcacaagcctaagaataagagatttggattgtagttccaattctgccataataacctgtatatctttacctaaatatgttcttccctgcaagcttaagtcccacatctgcaacatggaaaagtttgacacagcaatcttcatagtacatattgactcaaaattgtagacattcaaaagaaagaaagaagaaagaaagaaagagagagagagagaaagagaagaaagaaagaaaggagagagagagagacagaaaggaaaggaaaggaaagagggagggaaggagggaaggaaggaaggaaggaaggaaggaagtaagaaggaaggaaaaagaaagaaaggaggtcaataagaccttaaagacggtgtctaatgctgcagtaaatttggtagggccagaataggtcagatggacatgaatgcttcagaatgacacaggcctactcggagtagagattggtactgttgtccaccctcaaaaccatggatcatataggcccagagttgggttagcctgggccccacatacaacaaccaaggagccataagtttattaagagtcatgacgtcttccaggagaagcaaatcattccctaagctagccaacagcttgaaagtcagtaggtcagcttcatcaaaagagccaaaagagtaggtgtagttatgtttgtccatcaccacagccaggcagccggttatgtgtgtattatgaagtcataaaatctaccaagtatgtcattgctaagaattagtatagatcagccaataaatatgtatgtggttgtgctgtgggcccacaggtacccatctccacttctcacacacatgcagcacacgcatacagggctgaatggcccctgtgctacaatagcttggtgaggaagaaattgtagagaattagcaattgcttaccataaattctccttttagttctatttctttggctgtatgactccagcaaagcatttgttgttgttttctttgcctcataggtacaataaaagtattgtttcctgatggaagaaatagaaagaaagaagaaagaaagaaaaagaaagacagaaggaaagaaagaaaaagaaaggaagaaaggaagaaagaaaggaaggaaggaaggaagggaaaaagggagaaagagtgaaagagagagagaaggagagagggagagagagtgggagggaagggaggaggggaggaagggagggagggaaggaaggggagagagaaagaaagagagaaagagagaaagaaagaaagaagcaagcaaataaagaagcaagcaaagaaagaaaaagaaagaaagaaagaaaagaaaggaaggaagaaagaaagaggaagggagggagggaaggaagaaacaaaggaaggaaggaaagagagagaagaaagaaagaaggaaagaaagaaagaaaggaaggaagaaagaaaaagaagaaagaaagaagcaagcaaagaaagaagcaagcaaagaaagaagcaaggagagaaagaaagaaaggaagaaagagaggaagggagggagggagggaaggaaggagggaacaaaggaaggaaggagagagaagaaagaaagaaagagagagagagaaagaaagaaagaaaggagggagggagggaaggaaggaagaagaaagaaagaaagaaagagagagagagaaaaaggaagaaagaaagagaaagaaagaaagaaagagagagagagaaaaaggaagaaagagaaagaaagaaagaaagaaagaaagagaaatctccatcaggtcttaatgtcttcatgttgcctgtaggtgtgtgattagagactttgtcatagtggcatgagaactctgtctctcttcactgctaccttcccaagagaatagagaccttgtgctcagccacctgctctattttcccagcccagcagttagaaaggagaggttatgatgggcctaggagccttagcatcagagaagctagaattacctgctacagtctgctgaacagattctctcctctaagtatggacagaaatacattacacagtttccctgacatgttgctgattgcatgggagagggaaacataaattgacatgcaaacaagcaaaagagccagagtcataaatgctgtgtgctgtggtacaattagcacgaactttggttcccaccacttgcatagtcttgggccacaggatctctgatactgacctcctgcctcttaatgaggggatataataatgatctcataaagatgcttagatgtattgagtgagatgatcacagcccaagtgctcagggaaaagtgccagaatgacaacaaatttggaaataataataataaaacaatcttttattatatgttctttgaaatagaggtaaaattcatacaaagaaatgcacagatcttatatctgtttgaatgagattgacaaacacatacatgtggttgcacaacacctagatgagcatatagaacattaatcttgccttatgcccctttcaaattcactccaagcccttcaggggcaaatgttatactgacatagaaactaataacttgcttgtttttaatccttacataatgaaatcatataataacattaccttttgtgtccgactgttattcaatgtttgagattcattgtttttgtatgtatcagcagttattttattgttgaataatattacattgtttgagtctccatatttgttcttccatttatctgctgatagatgaacatttggtgttcccaattgagcgattgtgaattaagatatcacataaatccctgtacaaggcacaataacatatatttttaattatccgtggtaaatacccaggagtgaaattttctcccagtgtgtggcttgggttttttttttttttttcattttcttaatgatggtgtattcagaagagtagaagttttaaagtgtgacagaatcaaatatatctattttccctttaaattgaatattattgtgtctaagaactttggccttctcgaaggctgcaaaaatgttctgtttgtgatatctttccctagaagcagcataagtttagcatctatattaaggtttatggttcaaattgattaatatgtgcattccatgcaaggtacagatcaaggttcctttcttccaagatgctcttgtttttactaattattaataatgctgctatggacattcatgtgcaaatttttgtgtgaatacattttcagttctctttggtataatcatggaagtggaatttttgggtcacatggcaacactgtttaactcttgaagaaactgacacactgtttttacaatgactctaccattttatagtcccaccagcaacagcttcttagatgtggagattaatattgttaagcaaaatcaaaatgtttttagccattatatcttcaaatatcctctgcctcattctctcttctgaaattcccattatgcatatgtttttacactagattatgctccataggtctttgaagctctattcatttttttcattctttttttttttttcactgtttctcagagtgtataatctcgattgacctataattatgttgggtttttcttctgtccattcctacctgctggtgagcccctctggtgaatttctatttcagcgattgtactttacaacttcatcgcttatcttgaattatttcaatattgtgagacatgattttcatacttttctttagtctttttctccatgatttcctttagttcttggagtataccagctgatgtcatgatacatgctcatggatgagtagaatcaatattgtgagaatgaccatactgccaaaagcaatctacaaattcaaggcaatccgcatcaaaataccaccatcattcttcacagatttaggaaaagcaattctaaaattcatatggaaccaaaaaacagcccacatagccaaagcaagactaagcaaaaagaacaaatctggaggcatcacactacctgatttcaaactatactataaggccatagtcaccaaaatagcgtggcactggtataaaaataggcacatagaccaatggaacagaatagagaacccagaaataaacccaaatacttatagccaaatgatctttggcaaagcaaacaaaaacataaagtggggaaaaggattcccttttcaacaaatggtgctgggataattggctacccacatgtgggagaatgaaactggatcctcatctcacactttatacaaaaatcaactcaagatagattaaagacttaaaactaatacctgaaactataaaaattctagaagataacattggaaaaatccttctagacattggcttaggcaaggatttcatgaccaaaaggcaaaaagcaattgcaattaaaacaaagataaatagctgggacctaattaaactaaagggcttttgcacagcaaaaggaacagtcagtagagtaaatggacaacccacagagtgggagaaaatcttcacattctatacatctgacaaaggactaatatccagaatttacaacgaactcaaacaaatcagtaagaaaaaacgatcaatcccaccaaaaagtgggctaaggacatgaacagacaatccttaaaagaagatatacaggctgggcgcggtggctcatgcctgtaatcctagcactttgggaggccgaggcgggcggatcacgaggtcaggagatcgagaccatcctgactaacacggtgaaaccccgtctctactaaaaatacaaaaaattagccgggcgctgtggccggctcctgtagtcccagctggtcgggaggcggtggggggggagtgctgaggcaggagaatggcgtggacccgggaggcggagcttgaagtgagccgagatcgcgccactgcactccagcctgggtgaaagacaaagactccgtctcaaaaaaaaaaaaaaaaaaaaaaagaagaagaagatatacaaatggccaacaaacatatgaaaaaatgctcaacatcactaatgatcagggaaatgcaaatcaaaaccacaatgcaataccaccttactcctataagaatggccatattcaaagaatcgaaaaaccgtagatgttggtgtggatgcggcaatcagggaacacttctacactgctggtgggaatgtaaactagtacagctgctatggaaaacggtgtggagattccttaaagaactaaaagtagaactaccgtatgatctagcaatcccactactgggtaaccacccggaggaaaagaagtcattattcaaaaaagatacttgcacatccatgtttatagcagcacaattcacaatagcaaaatcctggaaccaatccaaatgcctatcaatcaatgagtagataaagaaactctgacatatatatatatatatatatatatatatatgagttttatatatatatgttttatatatatatcagtgtttcatatatatatatataatctttctttgtctttgactttcagcaatgcaattaaaatgtgccttggagagaacctgttttatatatatatgtatatagatctctctctcaccatgatgcccatatatgtatatatgatggaatactactcagccataaaaaggaatgaattaacagcatttgcaatgacctggatgagattagagatgattattccaagtgaagtaactcaggaatggaaagttaaacatcatacattctcactgatatgtgggagctaacctatgaggacgcaaaggaataagaatgataaagtggactttggggacttggggggaagagtgggaggggggcgggggataaaagataaaagacaacaaatatggtgcagtgtatactgctcaggtgatgggtgcaccaggttcttacaaatctccactaaagaacttactcatgtaaccaaataccacctgtaccccaataacttatagaaaaataaaattaaaaaaataaaggaacagggaaaactaccttcattagcagacaatacatatgcaaaaaattccaaagcatcaactaagaaaccatggaacctaataaatgaaatcaccaatgttgcagaatacatgattaaaagataacaattggtcgtatttctatacattgatgatgaaaaattcaaaattaaaattcagtaaacaattctatttagaatgtcaaaaaaaccaaaatgcttagaaatataaattacccatgacatgtaaatcttatacactaaaggctacaaaacacttccccaagaaagtaaagacctaaataaatggatgtagatcctttatttgtgaaatggaggacttaatattgttaagatggcacactacccaaagtgataatcaaatcactgcaattctctctctttttcttttctttttttttttttttttttgagatggagtctgactctgtcgcccaggctggagtgcagtggcacgatctcagctcactgcaacctcggcctcccaggctcaagcgattctcctgtctcagcctcctgagtagctgggattacaggcgcacgctgtcatacttggctaattttttgtattttactagagacggggtttcaccgtgttgcccaagctggtctcgaacttctgagctcaggcaatccacccgtcttggcctcccaaagtgctaggattacagccaccgtgcccagcccgaatcaatgcaattcttatcaaaaattttatggctttcttgtagaaatggaaaagtgggttctaacgttcatttggaatttcaagggatcccaaatagccgtacaatcttgactaagaggaacacagttggaagactcacacttcacaaatactatcttataacccattatttaaactgacaacaacttaacactgcttccataaacaaacaagagaaagaaaactaataaagactctatactttaacttcattcccgccactttttaactgataattgctgtgctttctctcaccccatgcacagaaatgctctgtgccccatacctgcaaccgggagatgaaggaggagtggcatcagtgatacaagtgtttttcctaccccttcagcgcctctttcagtgatataaagttaaaatcagttactgtgagtgctcacctgattttttggttcttataaaggtgatctttctctgcagatacttgttaaattggtgaccttggtgggggcaggggggatcattggagccttctattccaccatcttgttctgccaccctcctctcttaatttttattctctctgaacgattttatttctccttcatttctgaaggatagctttgctgagggtaatgttcttagctgacagttttctcttttagtaatttgaatatattatgccattctttcctggcctgtaaggtttctcccgagaaattctctgttagtcagatgggggttaccttatatgtgacttgacatttttctcttgctgcttttaaaaatctttctttgtctttgacttttagcaatgcaattaaaatgtgccttggagagaacccgtttaggttgaatttatttagggttcttatagcttcctggacctggatttctatctctctcccaagatgcaagaagttttctgctattattttatgcgtctgatggaaaagttgcctcttccaattttatggagtagattttataagcgaaaacttatttttatgaatgggtctttaggtgttagttcatttgagtttgttggtttttgttgcaggtgtatgtagcagtattgtttccatagagtttcttcacctatgatccacacttgtggcacttgagagtttctcagcgccctagttgagagagtgtgctgctacagtggcatggctttgccagtgctgtggttccagcgctaattctcaggtcaggggtgtgtgcatccacgtggtaggtaattcaattaaggtatgactcaatggtattggggccagggtgctgttatcctggctggaagcatgggcacatgtttgttcagtcagtgagtgtgactacaggctaggggtggcctgtgaagctgtttcttggtttcaggacgtggaagtacagcttctcaactggtctgaagacatgtctgccagggtcagtctactgggctttttctcaggcccaagatgtgggtgtaaggctgcttggatggcctacgagaggaagggaatgagagaggaaagagggctttttctcaggcacttgacacagctgcatggctgagtggctaggctttgagcatttctgtaaggggtggcccaagaagatattctgtaggcctagggtgtaggcatggagcttcttggttgtccttcatgtgtgaccaccagaggcaatctgtaggactgtttctcagacctgggacatgaccacataactacttggctggcttgggtatgcccaccaggggtggcccatgggctgtttctcaggtttgggaaatgggctctcggcagctgggccagcgtggtgtcaagcccagcaggggagcttgtgagtctgtttctcaagctcttattgggagtatagggccactgagcaggccatggatgtgtctctggagggagagagtgttacagggctatttctcaggtactcagtgtggacacatagccactgtgctgccacaggggcatataaactgtgtcaagctcagtgacctgtctcctacttggtgaactttaaaatattctactattttttccttgtttattttttatcatttgatattttcccaatcatgataccacatctaagatgtatgcagcactataccatgtttatgctttccaaattaccgatttctgctttcatctttatcaatagatttatttttaattttgaaatgcttttttttcaaatttcattaaatccaatcatgatatgagtatcataatcacatgttgtgcctagtttgcattttcctgctttgtttttgcaaatcttgtgcacctttgttttatctgtatcttttggacactagattagttggaagttttgttcttgatccataagtaagattaatatttcagactcttgtttgttccggtaatcttggaacacaacagttcctggtatttccttaagggaagtgtaaggaagattatagtgattagcaggtacagcaataaatttgtgttcaggaaaactttactcttttcttttggggtccctgccataaggaaatacttactgcccttagggcaaacagataaaactggtaagatctcagaatggctcatagagaaaccacatagctcacatgcttcaagtttgatggcataagtagcattttttcctatggttggcctttcccctctccccttccatatagcattgcttacaggaaggttaggattttaagagagaataatagaaaataagtttccaagccgtcctttctccagaactaccctccacagtgttctgaatgcatacagggtcactgttcaaatgttgctgcttctcctgttgtcttctcataacaaggactttttcagtcaaagtaaagaaactggccgggtgcagtggctcatgcctgtaatcccagcagtttgggaggctgaggcgggcggatcacgaggtcaggagattgagaccatcctggctaacacggtgaaaccccgtctctactaaaaatacaaaaaattagccgggcgtggtggcaggcacctgtagtcccagctacttgggaagctgaggcaggagaatggcatgaacctgggaggcacagcttgcagtgagccgagatggtgccactgcactccagcctgggcgacagagcgagactctgtctcaaaaacaaacaaacaaaaaaaacaaaacaaacaaacaaacaaacaaaaaaccttccttggatttttcaagaagttttcacaattgcaaaaaaacaaaacaaaacaacacaacacaacaaaacaaaacaaaagcaaaaaaaccctatgcttccacccaaggtaaaaattttagctttaggtccactctcaatacattatttaatgaactgaagttggcaaatattcctcacagcctgttggagggttcagcagtttattacagaagtatgaaatgcttttatttaaaaaatgtattttggtaaatacatttttgtttaggtaaatatcatcaaataatccaatttggaaaccaacattcttacttctttttccaacagttgttcctatcatcataaaaacatgttaaatttttctcatcctttcaaaaaatctctggagcttacctcaccctccagatacagcctcacctctcattccaccatgaaatcagacttcttgagatggtttcagctggactccatccttcaactgacaacccaacacaactgtattcatctctcgttaacattactagcagtgagtaacatcagaaagtttttgacacatgttagtcttttttgtgatgaacttcacagatacatttgacattggtatgcctcatttatttgttgaaatttttttctttggcttccatgaagtttctttctcttctgtatcattctacttctatgactgctccttctcgagtaaaacagaatgtgtctcaggattactttaaaacaagacaaagtatagagttatacctaaaatttagtatttaagttattggatcagaaaggaaactcgcatttagagtatgaaggcattgtcagccaccaattacttttgtaacctgaagctagtctccttcctactccggactgaatttcttctgtataatgcaagcgatctggcatgatgatatacaaagaccgataaaattttgctggggattctgaaagtaaaaaaaattgcctttgatattatgtccccatgctaagtccctggggactttgacattatcccccactgagcaggggtgaggaagctggcatttactaataagctatgaaagggcagtgccttttgacatttcagctccacccatagcacacccactcaaggaacatataaatgaagagatccgctcagttctcagacaagatttttcaagcaagatgaagtccatcatcctctttgtcctttccctgctccttatcttggagaagcaagcagctgtgatgggacaaaaaggtgagtggagagggtaagccttggggaaagctactttaaaaaaatggcctctaaggatattcagggtgcaaacagtaacctgttcaggcacagattcttctccttgatgagaattgatttttctccacccaacgctgtaggcttttggaaatatcagaaatttgttgggaaaaggtgggaggtaagagttgcaagagagctttggagataatgaatgcatacatttctattatcaattaccaggtggatcaaaaggccaattgccaagcggatcttcccaatttccacatggacaaaagggccagcactattttggacaaaaagaccaacaacatactaaatccaaaggcagtttttctattcaacacacatatcatgtagacatcaatgatcatgactggacccgaaaaagtcagcaatatgatttgaatgccctacataaggcgacaaaatcaaaacaacacctaggtggaagtcaacaactgctcaattataaacaagaaggcagagaccatgataaatcaaaaggtcattttcacatgatagttatacatcataaaggaggccaagctcatcatgggacacaaaatccttctcaagatcaggggaatagcccatctggaaagggattatccagtcaatgttcaaacacagaaaaaaggctatgggttcatggactaagtaaagaacaagcttcagcctctggtgcacaaaaaggtagaacacaaggtggatcccaaagcagttatgttctccaaactgaagaactagtagttaacaaacaacaacgtgagactaaaaattctcatcaaaataaagggcattaccaaaatgtggttgacgtgagagaggaacattcaagtaaactacaaacttcactccatcctgcacatcaagacagactccaacatggacccaaagacatttttactacccaagatgagctcctagtatataacaagaatcaacaccagacaaaaaatctcagtcaagatcaagagcatggccggaaggcacataaaatatcatacccgtcttcacgtacagaagaaagacaacttcaccatggagaaaagagtgtacagaaagatgtatccaaaggcagcatttctatccaaactgaagagaaaatacatggcaagtctcaaaaccaggtaacaattcatagtcaagatcaagagcatggccataaggaaaataaaatatcataccaatcttcaagtacagaagaaagacatctcaactgtggagaaaagggcatccagaaaggtgtatccaaaggcagtatttcgatccaaactgaagagcaaatacatggcaagtctcaaaaccaggtaagaattcctagtcaagctcaagagtatggccataaggaaaataaaatatcataccaatcttcgagtacagaagaaagacgtctcaacagtggagaaaaggatgtacagaaaggtgtatccaaaggcagtatttctatccaaactgaagagaaaatacatggcaagtctcaaaaccaggtaacaattcctagtcaagatcaagagcatggccataaggaaaataaaatgtcataccaatcttcaagtacagaagaaagacgactcaactatggaggaaagagcacgcagaaagatgtatcccaaagcagtatttctttccaaattgaaaagctagtagaaggcaagtctcaaatccagacaccaaatcctaatcaagatcaatggtctggccaaaatgcaaaaggaaagtctggtcaatctgcagatagcaaacaagacctactcagtcatgaacaaaaaggcagatacaaacaggaatccagtgagtcacataatattgtaattactgagcatgaggttgcccaagatgatcatttgacacaacaatataatgaagacagaaatccaatatctacatagccctgttgcttagcaaccacttgaaaagctggaccaatagcaaggtaagtttgcttttcttaccaaataggagaggtgcctgtcccaaagttggggactctccaggaacatggtaggactgataaccattgttcacatcaatagaagtgctatattacaagtggtgggaagatgaacaccatttcctggcgagtagaggacctggtagtggcagggaaggctgcttggactatcactgggtcctagaattcctattcttaattgagtattcttcaataatatttttatacatgcctacctgctaaagatttttttgaacatgcactgactatatatgcatatttatgagtttatggtatactcttgtcaattcttatactttagattagtaaacctcaaattctttctcatatagtatgaaatattacagcagttaatattttctttctgcacatacatgaatgttcttgcatccctgttagagttcatctatgctccttcagagaccacaagcccaaagactagcagtccactctctctgaatataggaaagatatgagtagaaagaaggattcctgttcagattgtgaaaaaggaagtggaaatggaggtgcaggagatgctgagagatctcaggtgctaactggacacttgcaatgtcaggagaggaaaattttaacctggattggggaaatggttcttccatgcccctttgcaataagtaacactgtacctgaagagagggtaagcagcagaaacaatggtcccagctgataactagtgacctggtgtcctaatgatcagggggctggtgcagttgacgctaaaggggacaggggtcccagctctcccatcctcacccccactctccactatcctcacatatctggttgtcttttttctccctaggtgtcacccgacctcagtgaagtctttgatgtttctgagaggcagactcccatgtggtcccagatccttggtccatggatgacaccaccttcccatgcttccttgcattaggctttctaaacccggagccccttcaaacttccaataaagggatcattttctgctttatctgcttttggctccagtgatctctgaattcctagtggctcaaggggctgaggtcatttctgataaaaatggttttggaagaaaagaatgggatattttttaagcattagggagaatagcaatcaaagccacatttctagatgtattgatagaaatccaacactaaaaacaagatgctattactctgccaggcacacatctacttcctgatgccaaccctaaagtctctcgtgacctctgtactaacaggaccccaggatctaacagtcccccagaaagaacagagaaaatgtattgcaacaagccctaggaaagtccctgatctactagtgccatgagtattccccaagtccacagcagcatatctcttcacttagcttaagaactgtcctactcctacagcatacatttagatgcaatcacaccaaagagtgatatgtcaagtctccaccacttcagcaagagtgagtggatttaaaaatgttatctgtgatggaaagaccagacgaccaggccagagtcttggggcaggtggtgtgttaataatagaaattctactccttttatgccctttcaccctttattctaaggatgattccagggaaagccaaacatccaggagaagaagccaacatagaggaataagaaaaatcactagtctaggaataagagatctggattccattctagctctgttttaagaactagtatatctttaattaaatcttttctttcctgcaagcttaagtcccacatctgcccatgaaaaactttgacacagttaacttcatagtacatgctgactaaatattgtagagcttccttaaaaagaaagaaagagagagggagggagggagagggagaagagaaaaagagagaagacaaaaagagagaaagaaagcaaagaaagagaaagaaagaaagaaagaaagaaagagaaagaaagaaaagaaaagagaaagaaagagatggaagggaggaaaaaggaatgaaggaaaaagaaaggaaggaaggaaaataaaggaagggaaagaaagaaaagagagagagaaagaagaaagaaaagaaagaaagaaagaaagaaagaaagaaagaaaaagaaaaacaaagaaagaaagaaagagagaaagaatcttctctatgaggtctgatattgcttgtaggtgtgtgataaaagacttggtcatagtgttatgagaatcctgtctctcttcactgcatccttcccaagaacacagaggccctgtgatcagccacctgccttattttaccagcccagcagttaaagaggagaggctgtgatgggcttaggggccttagcatcagggaagctagaattacctgctacagtctgctgaacagactctcttctctacatgtggagagacatacattcaacagtttccctgacatgttgctgattgtgcagggaaggaaacctaaattaacatgcaaataaccaagacagccagagtcataaatgctgtggctgtggtacaattagcttgaaatgtggatcccaccgcttgcatagtcttggaaagtggggtctctgatgcagagttccttcaccttaacgtggggataataataaccatctcatagacgtgcttaaagatattgagtgagatgatctcaaccccagtgctcaaaaaaaaaaaagtgccaggacaacaaatttggaagtaataataataaaataattttttattatgccttctttgaaaaggaggtaaaatacatataaagaaaagcacagatcttatgtatttgcttgaatgagatttgacaaacacatacatatgattgcacaacgcctagatgaacgtatggaacattcatcttgccttatgctcctttcaaattcagtcccagttcttcaggggcaaataatatattgacttctagaaactcataactcacctgtttttaatccttacataatgaatttatggaataacattaccttttgtgtatcgctgttattcagtgtttttgagattcattctgttttgtatgtatcagcagttcattcattttattgctgaatagtattccattgtttgagtctccacatttgttcttctatttatctgctgataaacatttggtgttcccagtttgggtcactgtgaattaggatatcacataagttcttgtacaaggcacagtaatatatatttttaaatatctgtggtaaatacctagaagtagaattttctcccagggtgtggcttgttttgttttgttttgtttcttaatgatgatgtatttggaagagctaaagttttaaagtgtgatgaaatcaaacatattcattttccttttaatatgaatattattgtatctaagaacttttgccttctccaaggctgcagaaatgttctgtctgtgatgtccttccctagaagctgcataggtttagcatctatactaaggtttatggtccaacttgattaacattcgcattccactcaaggtgcagatccagattcctttttcgcagatgctcgtttttattagttattaataatgctgctatgggcattcatgtgcaaatatttgcgtgaatacattttcagttctcttgggtataattatggaagtggaatttttgattctggtgtgctataaggttctaactatattattttgcatgtggatatccagttttcccagtatgatttgctgaaaagatgactttttctactgaatagtttttctacccttgttgaagataagtgaattgacaatgtaatggttgatttttggactcccaattctattcctttgatatatgtgtctatgcttatgctagtaccacactgtcttgacactgtagctttgccgtaagtgttgaaatatggaagtatgagtcttctacatttgcactctttttcaagattgtggttgctattctgggttctatgcatttacacatgaactttaggattaacatgtcaatttctacaaaaagtcatctgtaactttataggaattccatttagtttttagataaaatatggaaaattgcctgcctaagaatattgagtcttcaatccacaaacatggaatggctctctatttttatgtcttctttaatttctttcatcatgatttgttgttttcaacaaatgtacatgtcttgccattattttcttaaataaattcctgtgtatttcattcttttcgatgctattgtaaatggatttttttcatgatgcaattgaaaggtataggttgatattttgtcctgcaccttgatgagttgtttattagctctaataatattttggagttatgtggattcttaaaagttttctacatatgtcatcatgtcagtatttcatgtatgggaaatctaatggtgaaaaacatgaagtattcatatatctgggagtaccttaatttttccctaacttgtgaaggatagatttgccaagatatagaattcttggtagaccgatatttctttcaccacttttaatatgttctctcactatcttctggcttgcatggttctaatgataaatcagctgttaagcttatttattagtcattttgagttatttatctcttgctgctttcaagaatttctcggccaagcgcggtggctcatgcctataatcccagcactttgggaggctgaggtgggcagatcatgaggtcaggagttagagaccagcctggccaacatggtgaaaccccgtctctattaaagatacaaaaaattagctgggcgtggtggtgtgcacctgtaatcccagctactcgagaagctgggacaggagaatcgcttgaacccaggaggcggaggttgcagtgagccaagattgtgccattgcactccagcctgagcgacaggatgagactgtttcaaagaaaaaagaatttatttttgtctttgtcattgatatttccattataaattgtctaggtgtggatctcttacagttttttcttagtgttcattgagatttttatacatggagatttgtgttttaaagcaaaatcaaatgtttttagccattacatcttcaaatatctgtctgcctctttctttctctctcctttcttctgggatttccattatgcacatgtttttccattagattgtattacacaggtctctttctttatcgttcctcagagtgtataatctcaattgacctataattatagtagttgttcctctcttctgtctattcctatctgctggtaagaccctcttgtgactttctgtatcagcgattttactttacaacctcatcattcatcatgaattttttttatgatgtgaaactgatttttatactttctgttaatctttttgcccatgatttcctttagttctttgagtataataactgatatctttgtccactaggccattgtctgggattcctaaaggatcatttctatttattgtttcccctcttttctgtgtatgggcagtatttcatgtttctttaaacatctcataatttttaaataaaattgtactttctacgtaatataatttggcagctttggaaatcagaatctatctttagcatttgtttgtgtggtttttattgctgaatacttgcttagtaacattcctggactaattttgtaaagtctgtgttatgcatcgtgtacagccactaaattccctgtttcgtttgcttactagtcagataatgaatggacaccaatgatcttaagtcctgtaagccataagttggccttttgactttatcaactagtgaagttttgacacagtcatgaagacattaagacatgaattaaatgagaaaaatttttcacgaattaaacttaaagcctgtggtgcacaaggaactagatttttcataaatctagaaattatcttgctaatagatcaatatctggctcttactttctgtctgtgtgtgtttcaatgttaatgtagtaaaagtaaacacttcaaatgcacccttatctgaacatggctgtgaggagtcggtttcaaatgttctggatacacagtgggaagagggaaattggtcagtcctgatgcagtccctgggaaaaacaatgccctcctattacctaaaaattcgacagtataaagtaagaattaggaagagccaggacagttctgcaacaccccgaaaaaaggaaaatccatgggggctctgaaaaattacaccccagaagttgtttcacgtggttgcttcctggaagtgaaagaaaacagctggtgcttccgggtcaagttgaggcacctctgatctccagcccccggagccacagcaccacctgctggtggggccccgctagagctgacatagacaggtccagcctccaggtgcgcccaatcccttttcttgcattatgaagctaagcagcctctctcaactcactgtgaccgtccccctttgcctcctccacatggcccagcctggagccctgaaaagtggcgggtagggcgtggcgacgcgtactgtggctggagttggggagcatttcctctgaggagtccatgcgacgacctggccctcatgcctggaagtcacttggtgtccccgactcaccctgtggcatttttctccagctgcacagaaacctgaatgttgcccagagttttctgttgcctgccctttcatcctgttacccatgtgctggcaggataaaatttgcaaaggggttaaatggtgttgctactacgaacgtcggcattagtgtatggagtcctgctggactttggattgaggttaggagccccagatctgctgcccgtgaaaccttcctgcagaagcattgtcttagaaggagttgagaacttcatgttcccctagaaaatcgttgtgatcagaggttttaaattgggtcgacccatagatctgcctctggacaatgaagcaagacctccttgcttagattatgcaccttccatttcacacaacggacttcacccttctcctctctgtaaagaggatatttcagcaagattcattaagatcctcaacagttaccgggtttttattattttttattcctattttctacagcttataataatgaaacactttcctcttcatatttacattgtgagtgtttatataatttcacacttccttaggatggcttgcctagaatccctgatccccgtccttgattcctggatagcacatgccagtgttctttggagaatacataagaggatccagacaatggcgtcctattgcctcaaaatctgctggatgaagtaaaaatgatgaagagttctgtaacaccctgaaaggaggcagtccatgagggctctcagaagttacatcccagttgtttcacgttgtctcttcctggaggtgaaaggaaacagatggtgcttccgggttaagcggaggcacctctgacctccagccccgggagtcaaaacgccatctgttgatggggccccgccaaagctgacatagacaggtccagcctccaggtgcccccacaccgttttcttgcattatgaagctgagcggcttctttctactctctgtgaacatcctcctttgcctctgaatgacccagcctggagtcttgaggagtgcaggtagggcctggcgaccctgggtgtggctggggttgggaacgtttcctctgaggagtccatggggtgacctggcctggaaatcacacattggtgcccactcatcctacggcttttttttttttttttggagtctcgttctgtcacccaggctggagtgcagtgacgagatctcggctcactgcatcctccgcctcctggatttaagcgattctcctgcctcagcctcctgacctatggcgttttttccagctgcacggaaaccgggatattgcccagagtttgatcttgactgccctttcactctcttacctatgcgctggcgtgataagagttgcagggggtcaagaagtgttgctactacaactgtcggcatcagtgtatggagccctggtggactttggattgaggtgaggagccccagatctgctgttctccttgctgcccctaactccttccctcagaagcatttgtcttagagagaactgagaacttcccatgcgtttagcaaccgttgtgagcagggcttttaaattgggtcagtccacgcatttgcctctctaaagtgaaggaggaggctcaacagacctctttgctcagatatgcaccttccacttcacataatgggcatcactcttctcctctctataactctctataatgtcgacatttcaacaagattatctctaaggtactcaatagttactggattttattatttattttcaaatccttttacttacagtttacaatcatgaaacattttcctctttacatttacatcgtgaggtaagtttataatttcacaattccttaggatggcttgcctagagtccctgatccccagtccctgactctttggcagcacctgccagtgttcttgtgaggagaatacctaacaggaatcacgcctcaatgcccccgggacacaaaaccatgtgccctgtacattttgcatcttcctatatctctggtttcctgttctctcccaagatggaaagcccttcttaaccaggactgaggagacacaagtgctacaggctcagtctgggataactggtctccatgttgtccatgatcgctcaggcccagaacttccttttagcaagagttaaatgcttcttactatgataacaagacgaagaaataaagcgttgtatatttaaaactctttgaaaatctaagtctgctggattgatctcttgctctccctctctactcagccatgttgcataatcccttaggaactgtaaaatggacagagttactgtttcacatttagtttcatcaattcctgcacttgtgtttttctgatatatttgtctctttcaatatctcctgacactcagattctctgttggtcagattccaggtgcattttggagttaaattctctgggtttgcatcctatgaatggcatgccgattaatcctgtaatggaagagcaaggcatttttgcttcagtttttctggtactactgctggtggcctttccaagtgttgaagtaatatgatctgcgattggatttggaacttagggtcagaaactgagcaagatgtactttagttctaggtactttcattcctaaaaattgagccaccctaaattaggagaacaaaatccttgtggttcagcctacatcccttgagtctttgcttgagggttgggccctaggtctacctaataatgaagtgtaattagccatgaattttccaaatttataactctgtgcttcattcttccttaactcccacaaatgttgcagaggtctgggaaagtaattttccaaaattttatttatctctgacaagtatcttaacaattttgaaaaactactttttcccaagcatgttttaaactgacatctaataattttatcatcattgcatagtttcaagagataaaaatttaggtatatgataaatgttgtcatttaaatcaaatgggtatcttactctatgaggtttctaatagaatctaactacaatgttcatttgttagtaacatctattagggaagaaaaaaaacatgtcctttttcctcatcatctctctatctttcacatcagagaggagctaccctctctgcaagagcttcgaagagagaagctaccctttctgcgagagcttcaaagaccagcagacatccgaacaccctgcctgcagagaggagccaccctctccagggccccctctctgttgagagctgaatactcaagggatgatctgcctacagagagtaacaacccactacaggtctcctctgagctcttctaacactaaataaagctcttcttcatcgtcttcacccttcacttgtctgtgtaccttattctttctggatgcagaacaggaactcaggcaaaggtgccaccagccacagaggtttctggaaagaaaatgaacaccccaaagatcatgtaacacttctactaatttgggtttggcttgttcttgcttttctagttttttgagatgcattgttaggttacttatttgatatctttccagtttttttatgtaggggcttattgctattaacttgcctcttaatactatttttgccatgctccataagtttcgtttttttgtatttctacttttgattgtttcaaggaatttttaattttattcttaatttcttttttcatccactggtcattcaggagcatgtcgtttaatttccatatattttgtatagttttgaatgttcctgttgttattgatgtctagttttatttccttgtggtcatataagatacttgatatgattttgattttttaaaattttttgagacttcttttgtattttagcacttggtcaatcctggagaatgtttcatgtgcagatacaacaaaagtgcattccatagctgctgggtaaaatgttttgcaaatgtctgttaagttcatttgatctatagtacagtttaaacttgatgcttctgggttaattttccatcttgattatctttccaatactgagagtagggtgttaaaatccccacgtattattgcgttagagtctatctctcccttcagctctaataatgttcaccttatatatccagatgctccagtgttgggtgcatatatatttataattattatgttctcttgctgaattagtccctttactattacataatgttcttatttgtccctttttccagattttgacttgaagtctattttgtctgatattagtatagctactccttcttgcttttggtttctgtttgcatggaatatcttttccataccttcaattcaaccccatatatgtctttacaggtgatgtgagttctcgtgggcaggacacagttgagtttaggtgttttacccattcagccagtctacatattttaaatggtgaatttaatccatttatattcggggctgttgttgaaaggtgagggcttaaacctcttattttattgattgttttctgattgtttcatatatcttttgttccttacttcctatcttattgtaagttttgggctgggttgttttctgtggtgacaattcttgattcttttctcttcctcctttgtgtatcggctctgccagtgagttttagagtttcttaaactttcatgatggtggcagttgtcttctcacttccagacatgactctcttgaaaatattttgtaaagccagtctagtggtgatgaatccccttagctattgcttatctatgaagaattttatttctctttcatttctgaaagataattttgctgggtattcttgtccactagttttttttttcttttagtaatttgaatatattattccattctcttctggactataaggtttttgctaagaaatcctctgttagtctgatgaggatttcattatatgtgacatgatgcttttctcttcttgttttaagaattctttctttgtctgtgacttttgacaatttgacaatagcgtgcctcagaaaggacctgtttgggttgaacctaaatggggtgttttgagcttcctggacctgtatgtccatctcactgccaatacttgggaagttttcagctatttttaacatgttatttatacattttccattctcttttcttctggaatgcccgtaatgtgaatacttgttcacttaattttgaacaaatggtgtccccagaatcctgtaggctttcttcatttatttttattcttttttatctttttgtctgctgatattatttcaagtatcctgtcctctagtgtagaaattatttctactctgttgttaaagttcacagttgtatttttttattttattcattgaattcttcaactctagaatttttgtttggtacatggctgcgtggccagcctgggagtgttcctgccaggggtagcccatgaggctgtttctcaggcccaggatgtggtcacacagctgcttggctgacccgggtgtatgtcggctgggggcaacctgaaagactgcttctctgtcctggaatgcaagcacaaggctgtccagctggacttgggggtctgtctgctggaggtggccccagagggctgcttcttaggtctaggatgcagggcacacagctgattgaccctcctgggggcatgtctgccaggggttgaccacagggctgcttctcaagcctggattacaggtgcaaggctgcttggctggactcagtgcatgtctgctggggctttctgtttctcagccccaggatgtgaattaatggctgctcagcccacctgaaggcttcccctggtgaggaagcctgtggtgttgtttctcagtcccagggcatggctgcacagctgctcatgcagcctagggcatgtctgccaggggcagcccacaggtctgtatctcaggccctgattgtgggtgcagggccattgggtaggccaggggcttgtttgagtgggtggggcaccatggaaatgtttctaatccctagacatggatgtgtacctgcttctcaggccttggaatgtgtcaacttctcagaggcctgagcaccactttcactcagaggagggtgtgcagcagtttgactggttcaagggcaggtttaccctgtgcgggactgtcatgccattcctccaggcggaagtgagggcagcgggggttgtttgttctacaggaccagagtcacagccagtcctgtatccacacttgatgctgctgggattatggcattcagccactggtgtgggcctggtggaatgaagaccaagccctgttgagggaaaagtgcagtggctactgggctccacaggagggcgcactccacaggtggctctggtctcaagatggcacctgctgcagcatcttggctgacagtgggtaggtggactatgaggagtgcaccccttgtgctttcagttcaaagcaatgcacctgcatgaattcctagcagcgtttcaaacggctcagggcttgtgtgtgagtactgcaggattctccgtagtaaggattttaggtgtttgtggtggtagtggagactagtgcggttcttttgcttaccttttccccacaataggatgtcctcctgactccagatagatcggatccaggtgtggaagacagggcggcagatgctggatgcatccatgctgccctgctagacttccaatccccacaggtgcatctccactcccctgctatattcgaatactcttccttggactctctaatcgagtttcatcagtttattcattgctttggtactttcttgtggggagaatgagtgcctgtcttctatagtcagtcgtcttggtgacatcactgagctaaatttctttatactgcatatcccatcctgaattattggagtcttttttaaaataatttttattcttaaccttcatactaaagatatgatttgcataccaccattatagtattagagcattctgaatttatgtaattacttctactactaatgagttctatacttttaatttttttattgttacacatgagtactctttctttcatcttttctttagcttttcttgtaagagagggttccccatccgccccccacccccactcagcccacatagcaggaggtgagcagagagtgagtgagcgttaccacctgagctctgcctcctgtcagatcaggggtggcattagtttctcataggagcaggaaccttattgtgaactgtgcatgcaagggatctaggttgcatgctccctatggcccccactgccccgccccaccaccccctccctccccacccctatccatggaaaaattgtcttccacgaaatcagtccctggtgccaaaaggtttaggatcactgttgtaagatatgcctgttagtgatgaagttcttcagcttttgattgtctaggaaagtatttctccttcatttctgaaagacaacttttctgggtacagtatccacggataacagttttttttttcttcatcactttgaatatctcatgccactctccttctggcctttaaggttcctgttgagaagtttgtatgtaggtatattggaactcccttatatgttatttgcttcttttctcttgctgctttcaggatcctttctttgtctttgatcttttatagtttgactattatatgtatgtctggtattttttggactgaatctgattggtgacctttgacctttctgtaccttgatatatcagggggtttgctagggcctgttgcaatacatttctctggtatttctgagagattgttagtccctaatctactggtgccatcaattccacaaatccacagcagcccaacccgtcacttggttcaaggactgtgctcctcctacagtatccattaagatcttaagatcttgtaccagcgattgatgtggcaactctctaccatttcagtaagcatgactgggtaaaacaatctgtgaatagacataccagaggatggtctaaaagagttttgggggttgggaagtcttaaaatggaagctctgctgcctatactgtcttcttcccctctcctaagaaagtttccagggaaggataaacctctaggagaagaagccagaatgggagaatagaaaacctttggactggggataggagatctggattttagttccagctctgccataagaacctgtgcatcttcaattaaatctgttttctctccaagcttaagttcctcatctgcacatagaaaatttggtgtagtaattctgatcatgcgtgctagcccaacattctgggagttcatttaaaaagaagaaagaaggaaagataaaataaagaaaggagagaaaggaaggaagaaagaaagaagaaagaaaaaaggaagaaagaaggaagaaaggaagaaggaaggaaacaaagaagaaaggaagagaggaggaaggaaggaaagagtgagagagaaagaaagaagaaggaaggaaggaaggatcttctctatcagatctaaattttgcctgtaggtgtgtggtaacagacatcatcacagtggcatgagaacctgtctccactgcactgttccctagagcacggatgccctgtgctcagccacctgccttatttttccagcccagcaattgaagaggagagaccatggtgggcttaggggccttagcatcagggaagctataattccctgctagagtctggtgacaagattctcacttttatgtgtggccagagatacattcaacagtgttcttgacacactggtaatggtatggagtcaggaagggtatctaaattgatatgccaacaagcaaaagagccagagccataaatgctctgggagaatacactcaagaatatgctggttattagcaggcgaacaattaaaattttggatctcctagcaaagttaacagttctatacataaatgtacaattagcatgaaccttggttttcaccacttacatagtcttgagcagcaaggtctctgatgctgaacttctgcatctttttcttttcttttcttttttcttttttctcactctgtcacccaggctggagtgcagtggtgtgatcttggctcactgcagcattgacctgattttcccacctcagccccctgagtagctgggattacaggtgcacgccaccatggccagctaattttttgtatttttagtagagatggggtttcactatgctgcccaggatggtcttgaactcctgaactcaagcaatctgcctgtctcggcctcccagagtgctgggattacaggcatgagcccccacgcctggccagacctcctgcgtcttaatgtgggaataataataaccatgtcatatagattttcagaggtattgagtgagattatctcagccccagtgctcaataaaaagttccagcatgacaacaaatttggtaataataataataaaacaatcttttattatatcttaatattgaggtaaaatatatacaaagaaaagcacagatctaatgtatttatttgaatgagatttggcaaatacatatgtgtagttacacaaaatcatatggagatatagaacattctcatcaaccttgaaagttgtctatgacgcattcaaatttaattccaacccttcaggggcaatcattatgctgacatctaccaatttaagacttgcctgttttttctcatttaagaagcatttattgttataaatgcactcaggcactgtaagacataacataaatgaaataattttcagataaaagcaactgcttattattttatcctgcctttatattatttttataaactgccttcagaaggtatcattcattaccataccagttgggtggtctgtaatatattcccacaaggtttgtcttccctttatttcttcttttgttcttacaaacatgtattctacagtgttgctgcttctaagttcattgattttctcttatgtattattttgatatgcaatgctttttttttttttgagatggaatctccctcattgtgtcacccaggctgaagcgcctgcaacctccacctcccaggctcaagtgattcttctgcctcagcccccaattaggtgagattacaggtgtgtgccaccatatccagctactttttgtatttttagtagagatggggtttcaccatgttggccaggctggtctcgaacccctgacctcaagtgattcgcccatcttagcctcccaaagtgctggtactacaggcatgagccaccatgcccactcttgatatacaatgcttcttaacccccttcctaataagatcatttctttttaacaatgtatataatattctggactgaagttcaatcccacaaattatcagtgatgataacaatttataattaccattcttggttaaaatctcaacttaacatgagcattggcacaaattctataaacaagccacttttaaaagccccaataaagttgactatataattaaagtgacctagttcaaatagaaacaagtgacagtagaagtgaattaatattatatgtgctacatggtagtgtagttatgatactcataattttgtattgccattgtagatattttcttctagtgctttcaagttaccaacagatatttatattcaagatttaagaaaaatatttcagaattcccaggaattctttaaattaaagttgttcttaaagtttatccaacattcttcacactgcttactcattatagacatggtttgatggttaagaaacattgagtttatcacatttacaaagaactgtaggttgtgaatattcatactctcagaaatatgctagttattagcaggtgaacaattaaaatttcggatctccttagcaaagttaacagttctatacagaactgtaaaccaaaattgccaatttcagaacttatttgcttccaaacttgttatttcctgaaacaccactcataggatttatatatatattcacttgtacgtctattaaaattaattttatttgcaagaatgactcactattagtagcatacagaatgataagcatatactcctaatgtggcaacaggtacaagcaacatgattagatggtgactgctttttccttagtgctcctgattcattctctgaacacattgaccttaatttttggctctacatgtcagcattttctggtctttgctttagacttctaaccagcaatgttactattttgaatcccaaggtttaattcttacaaaagaatgtaaagactataatactttttttttttttttgccaggcacagtggctcacgcctgtaattccagaactttgggaggctgaagagggtggatcaccctgagatcaggagttcaagactagcctgaccaacatagtgaaaccctgtctctactaaaaatacaaaaattagctgggcatggtggagggcacccgtaatcccagctactcgggaggccgaggcaagagaatcacttgaacctgggaggtggaggttgcagtgagctgggattgcatcattgcactccagcctgggtgacaagtgtgaaactccatctcaagaaaaaaaataaaaataaacaaaaacactggccaagctctcaatgttaagtagaaatggtgaagacagacatccttgccttctcctaaccttaaggagaaaacatccaatattttaccattagagatgatgtttatcagcggcataccaaggattgtggcagtgggagtggttcatctgaggaggagggagtgtttatctctgactctgtttaaaattgccagcacatagtgataatatacagtacagctttttaagccacttttattattattcttaaattctctacaattgggggacctatttattgcttacaactggggtgaactccttccaataacctccttccacttcagtacaccactaagatatgctttaagttgaatatagtgccctttatcatattgagagggagagcttctcttccttgcaggtggagaagttttataataaatgggttttggatttgtcaaatactttctctgttgagatgatcatatagtgaattacactgactaattttaatacaaaacatatcctgaatgtgtgtctcatttgaccttaatgtataatctatttaacatatttttggactgagtttatgactacttggttagagatttttatgcctatgtctatgaaggatgttagactgtaagtaaacttttttataatgttcttcccaggttttagtatcacagttatcttaggctcataaaagaagttgggaagtgttttctctgcttctcttgtcttaaaacatttttgtagaatgtataatttgtagatgtttaatagcatttacctgtgaagccacctggaccagcagtgtactttttggaaaggtttttcattaaaaatttgattgctttaacataggagtcaacaaacttcagcaaagagccaggaaatgaatattgtaagttttatatgccttaagatctttattgcaactccttgtctgtaccactataggacaaaggcagtcaaagatcattcttaccaatggatgtggttgtatgccaacaaacttcacttacagaatcagaagtggtaatctagtctcccagtccaggaatcaaagcaagtgtgtttaacttatatttgtttagttattcagttaattatttgtgctactttcttattgagatacaatttacaaaccatgacatgcaccttttaaggtgtacaatatagtggttttcagtattttgataagcttgtgcaaccctcaccacttgttaattccggaacaacttcattactcccatgaagaacccctatacctgatggcactcaatccttcctcctacctttacttctcccttggcaaccactaacctgctttttatgaattgacttattctggacactttatattaattaaagtatataatatgtggctcattgcatctgacttctttcatgcagaattatgttttcaaagctcatccatgttgtagggtgggatcttttttttttttttactttttatgtatgaataatatttcactgaatggatacatcacattttgtttatccatttatccattggtgaacatttggatgtttctagtttgtatgtactattattaatcctactatgaacatttatgtgcaaattttgtgttaaaatgttttcaattaccttgagtataattcttaaagtggaactgatgagtcacatgataactctatgtttaactcttcaaggaactgccagactgttttccacagaggatgtaccattttatgttcccaccagcaatgtatgaatgttccagattctccacatcctcactaacacttgttattttaggttttttttttttaagattatagctatcatagtacatgtgaagtggcttctcgttgtggttctgatttgcattttcctgaggtctaatgatatcacccatcattttacatgcttattggccatttgtacattttcttttggagaaatgtctgttaaaatctgatgcccagtttttaatcatggtttttgtcttttatggttgattttaggagttctttttgtattttgaatactaggcccttatcagatataaaatttgcaaatattttctcccatgtctgtgggttatcttttcatttcttattagtgccctttgactcaccaaagtttttaactttaatctatttttggatctattattccttttgttgcttgtgcttttggtagcatatctaagaaattgatgctgattaccagatcatgaagatatacatttatgttttcctcaaagagttttgtaattttagttcatatatttaggtcttgttttatttggagcccatttttgtacttgatatgatgtaacagtccatgtatatttttttgcaggtgcatatccagtttttccccattatttgttgaaaagactactctatccccactggatagtttttgtacctttgttgaaaataagacaatttaaaatgtaatggcttatttatggattctcaattctattcctttgatatattgtgtttatccttatgctagtaacacaacatcttgaaattgtagatttgtagtacacgttgaaataaaaaaatgtgagtcctccaattctgccctttttttttaagactgttttggctattctgggtcccttgcatttgtatacaaattttgggattcactgatctatttcaacaaaaattcacctgaagttttctagggattgcattgaatttatagatcaatttgtgaagaattaccagcttggcaacatcgagttttccaatccatgaacacagtatagctttctattttgggggtcttcttttatttccttgaaaaataattttccattttcagtataaaagtttctccattttttggttaaatgaatccctaattatcctattctttttatgctattgtaaatgaaattttattcttaaaaccatagagtgttgtattttgacattatgtcctgaaccttgctgaggtcatttattagctctaataatattttgagggattcttaaggattttctgtgtatgtatgtgtgtatatatatatatatacatgtacatatatgcgtgtatatatatacatatatatgcgtgtatatatatatatacatatatatgcgtgtatatatatatacatatatatgcgtgtatatatatatacatatatatgcgtgtatatatatatatcatcatgtcagtatttcttgcagtcaggttgatggtgatgaactcttcagtttttgtatatccaggaatgccttaatttttccctgacttctgaagaatagacataccaagatatagaatccttggttgataggtttttcttctgccgtttttaatgtgttctctcactaccttctggctttcatgattttaatgaaaaattactgtttagtttattaactgctcatgataagtggcttgtcccttgctttcaaaattttctccttgcctttgtcactaatatttcgatctaggtgtggatctcttagagattttcctacttagtgttctttgagcttcttagatgtagagattaatgtttttaatcaaaataaaaattttcgtcgtcattctatcttcatatattctttctgcgcctttctctttcttctctctcctgagattcccattatgcatatgtttttacactagattgtgttcttcaggtctctgaggctctgttcatttttcttaattattttctttattgttccttagagtgtataatctcaaatgacctgtaattaagttagccgatcctttcttctgtttctgtcttctggtgaacccctgttttgaatttctatttcattggttgtactttacaacttcattacttatctttaattctttctatgttgtaagacattattctcatacattcctttagtcttttgtccagagtttcctttagttatttcagtgtatttataatagctgatgtctttgtctactaatccatcatctgagctcctaaaggatcatctctgttcattgtttcccttcccttctctgtatgggcaatattttttgtttctttgcatgtctcgtaattctttaatgaaattggactttttacataatataatgtggccagtttggaaatcagattctctccccagggtttgtttgcacagtctttgctgttgattacttccttagtaactttcctggactaatttgctaaagtctgtatcgtgtgtcatgtgtagccactaaagacgctgttccattagcttagaggtcagctcatgattggacagaaatgatcttaaatactaaaccaataaatcacctggacttttccaaggggctgcatgtgtatccattgagatacactgtcaacattccactgggaaacttgcaactttatgttgtatttcacctcctgttcacatagagactttaattcagccagaggtgaacaattagggtcatctgaggtctttccttagcatgtacacagccctggggcaaacacacaattctgtgcaggagtgtggtattctaaagtcccacagatgtgacagagattttctttaagcacctggaaatctttcctaccttttccttttttgttttttggtcagcctcttgttagctccaattggcctcaccgtcggaagtagctgtgatggcaaaaaattgccccagaaatagcactgtccacatagagcacactctgagttagacgaggtaaatacatgctatgaaaagggtgcctttttagagagctgacatacaaatgaaatagtgacagttttccggggacagagctttcgaaagcagaaaggaaatcctcccgtgcaggggctgctgggctgctggttttcacagccactgtggagcaaacctggtggctttcaggctaccacacagctgggcacaaagatgggaatggaaaagttatactgccactaaactttctgttcttgctaaagttttcttgtttttcttgatgattcttaatgatgccactccttggattgtgacaaacctttggctgaattccaaaattctggggaaaaaaagttgatattgaaaatatatgtgagtacaggttgagcatctctacccagaaatctgaaatctgaaatgctccaaaatcctaaaagttttgagcaccaacatgaagccaaaagtggaaaactcctctcctgacctcatttgatgggttgcaggcaaaacgcaggctgacagtgatgaagctgatgttcgtaacactgcagaaaaagtgctgatagatgacatggtgaaaaagtgtgatgggcttattgaaggactgaagcagcctgtattcataccaaaacaagaaatcatgtaagtttaaaaatcaacaagaaatttctaagacaaaaaacattgttaatgagagagatgactctggagaaaacatttttaaaagtcatccagcagaatgcctcctcatctctagaggatccacttcctggtccctcaattgcttgtgatgtctcttttcacctacaaaaataaaatacagtgaccaataatcgtttaatcaaaacacagcatcgtagatggagactgaaatcctgctgctgttgcttcttgctgttgtttaacagctggggcaggtattttggtgatgctactgtgctgcttagttaccctgaacacattattttcacagtattaatggtatgtcgtatttttattgttaaatatttatgggtgaataagtgtaataaaatgattgcttattggtagcatataaattcgagtcagatacaatggtgatactaaacaatcacagattgtccacatgggcggctgagatagggacaactttctttctgatgtttcagtgtatacaaactttgtttcatgcaggaaaccggtaaaaatattgcataaaattaccttcagcctatgtgtataaggtatatgtgaaacacagataatgtttacacttgcctctcatccctaagatatctcattatttatatgcaaagattacaaaatgtgaaaatatccaaaatttgaaaaatttctggtcctaagaattttgaataatggattcttaaacttattctccctccttttatgaaggagcagattttactccaccgttgtgaaagtagttccctctgctgtatggtttttgtataggcttgccatcaaataagtgaacttctaatgttctgtcattattttctcatttatcatgaagagataagtgactctttcacacattctatagccaatacgaagataatcataacattttcccctgtactccattaatgagaagtatcccattgatttacttttaaatgttacaccaatcataaattgttgacataaaaccttacttgtgtatgatgtttcatcatttttatatatgaccaaattccctgtgtaaagttttgtttaggatttttgcctttatgtttatagcaaggctggaaaattgttttcctttcatgtaatatccttctcatgtttcggtatcacagaattgcagtgcatatcaaattagtttggaaacagaaaggtcagtgtgtggggttgcaaacaaacatcttgaaaatatgagtgcagacactttaaatatttaaagtacagacactttaaatatgagtgcaggcacttgaaaatatgagtgcaggcatattaaatcagttgggagggattttgtttttgtaaatttggactgaaactcagtgaggacatgccaattcagagttagaagaaaacagcagatttacacagggaaaacactcaacgtgtggaggtagccccaagtttgtgctagaaagaaaggtcggtgttggtaaatagagcagctactccagagagctttccctcatcatctctctgcctcccacatcaggtcccaattcttctgtgtgcattaataaatctacttcttactattgctgaagtcagatatgtttttagctaccaagcaagcaggaggaacatccatttttagaatagtgtagagaggacatgaaggtttatctggcccagattcacattccaaaatgacttcaagttagtcttttgaatccatcaactaatgaagtttttacacagtcatgaagacataaaagcaggaattaaggaaaaaagcattcattataaaacttaaatttcagtcccatggtgcaccatgaattgacaccatcatgaaagcatttgaaactataaaactcactgatagaaccaaaacacaaggaagaaagagaaaggaatcaaaccttattattacagaaaaccacccaaccacaaaaataaacaataagaagggaagtaaagagcaaaggatatacaaaaacaaccaggaaacaatcaatcaaatgataggagtaagtactcacctgtcagtaataaccctgaatataaacagattaaattccccattttaaaaatatagactggctaaaaggattaaaaaacaagacccaactatatagtgaaaactaacctcacctgtaaagacatacatagggtgaaagtaaagagaaggaaaaatattccatgaaaacaaatcaaaagcaagcaggagtagctatatttatatcagacaaaacagacttcaaattagaaactggaaaaaagagacaaggaatagcattatataattataaagggactaatttagtaaaagaatataacaattgtaaatatgtatgcactcaacagtggagcgtccagatatataaagtaaatattattagatattaaggaatatatagaccccaatacaataatagttagggacttcaacaccctactgtcagcattggaaagattattttaacagaaaatcaacaaagaaatatcagatataaactgcatcatagactaagcagacctaacagacatttacagcacatttcaccaaataactgcagaatacgtattccatcagcacaagtaacaatgtcaaaagttagccatagggtacaaaacaagtctcaagaattttaacaaatcaaaatcataccaagtattttatctgaccataatggaataaaactagaaagcaataacaataggaacatttaaaagtatacaaatacatggaaattaaacaacatgcacctgaatgataatgggtgaagaaagaaattaagaatacaatttcaaaattccttgaaataatcaaaaatataaacacaacataccaaaacctatgagacccagcaaaagcagtattaagaggcgagtttatagcaataaatgtctacattaaaaaactagaaaggtttcaaataaacaacctaatgatgcatctcaaggaactggaaaagcacaaacaagccaaacccaaaattagtagaaagaaagaaataataaagatcagagcagaaatacacaagagagagactaaaaattacaaaagatcaacaaaacaaaaagttggatttctgaaaagatacacaaaactggcaaaccataaactagaccacctagggaaaaaaagagagaagactcaaataaaatcagaaatgaaaaagcagacattaccactggtgacacagaaatacaaaggattcttagatactattatgagcaactataagctaacaaattggaaaacctagaggaaactgataaattcttagaaatgtataacctataaagattgaaccagaaaaaaatttagaaaccatgagcagttcaataatgagtaatgagactgaatcagtaataaaaagcttcctaacaacaacaacaaaatcccaggaatggaagacttcactgctgagttctaccaaacttttaaagaagagttaacatcagttcttctttaaactattccaaaaaattaaggaggagaaaggagaaaattctcccaaactcattctatgagtccaacattaccctgataccaaaactaaataagggcacgtggacacacacatgcacacacacaccaaaaaactacaggccaatattccttatgaacatagatacaaaaatcctcaataaaatactagcaaactgaacccaacaagacattaaaaagataatacactataatcaagtaggatttattccagggatgaagaatgtgtttcaacatatataaatcatttatgaatgttttaaataaatgtgatacatcacatcaacagaatgaaggacaaaaagtccatatgattatctcaatagatgcagaaaaatcatttggtaaaattcaatatcccttcatgataaggactctcaataaagtaggtatagaagaaaagtatctcaacccaataaaggccatatagacaaacccacagctaacatcatactgaactggaacaagaaaagcatgccaactctcactgctcttattcaacttaatattagaagtcatagagcaattaggaaagagaaagaaataaaagcctttcaaattggaaaagaagtctaattatccctctttgcagataacataattatatctacagaagaacctttagactctgcaaataaactcttagaaccaatcaatgaattcagtaaatatgcaggatacagcatcaacatacaaaaatcagtagcatttctatacagccctacagggcttagtgggtgttctccctgtgtgcagagacaagagattgtaaaagacacaagaccaagagataaagagaaagcagctgggcccaggggaccactaccatcaagatgcagagactggtagtggtggctgtgtctttagctttgcaagctttttagtttgaggtagtcccacttgtctatttttgctttttttgcctgtcagccctgctttcttttccctgtcacaggtgtcactccccaggacactccccagcaaaccccctgttcacaaacatttgcctctgggactgttttccagaaaacctgacctaaggaagattataaaagtttatcattatccaaaaattggagaagaagagtagaaaaaaaatagtactgtcactttttcagcatgtgttctgtatgtaacccaggagtttatctcatttcaacgctaggtctcctccccctgcaaggtgctacttggggcacactcctagtagcgtatttgcccgagcctaggttcctcagtctggaataacccttgctggaggtgagaaaagtatgtagcagaatggtccagtgaggtttggggcattccaagtctttcaaaataatcgagagtgggcactgacgtaacatggttagtctttttgaggactccatttgctgtgagttgcagataatcttaatttttctgagtgtccagagagtgttggttggattagacaacagacagacctacaacatatcaagtgtgaaaaccaatatatatatcgtaacacatacagaggtgaacacaggaatctgccccaacagttctgtatggctttagatgaaaaccccctggattaaaatagcttaactgttggcaggatctcttatgcataaactcgtctcaggaaagtttttcacctgcagttgacaatcctgccagaggcagtaaaattgaggtttctgattcttcatgttattgtacatccctaatcccattgaaatttaggagataaaatcacttgtcccaaatcacagagtcagcactttcacactcatgatataaattcaagttcccccagtccctaagcctcttcctcccactacgtattcataggaaggaggcctcatatctagatcttccctcacagcttcccaccccactcatacccccaacgaatcacagaagcaggatgtgcaaagagaaataggctcgtttatttattcattgatcaactggcacttcttgaaagcctgctgtgtgccaagcctttccccaaaggaggatatcagtggtggagccaagtctcagggtggaaaggacctggaccacacagagcaggactccagagcctcctccatatggcaggaatcaagctgtgagagaaaatcagataagagcttcagcatagaaaccagccaaatcatatccacatccttcctcctgcccaaggatccttctgagatagagaaaatagcaagatagcgctatagttgagagagacttagtgtcaggagacaagtctcattttcaccgtaaaactctaaactcaaagcattgaactagataatcctcaaactccactgatcctttgtgatttcacctcagaaaacatgatggaaacaacctgaataataaattcttagtgcacatagtgctttgcagagcactttcaatctcattatgtacattttaccgataaagaaactgagactcagaaagacacttgcccaggacccccacccagagacactagaatagaatcaaagccacaggcgatcctatggaaatcctggccctgagacctggagaacagttctcttgaaggacaagggagtcagacagaggctgtgcttggagtagggttcaggagtccccctgcccatatgcctgggcctccagagggttgaggctgagagggctggagggagctcagtgtgccctcatcccctgcttacctttcacaggggaaacgcaggatttcccacacatgcccatgcaacacttcaagtcacgcttgcactggccatccatctcacagaaattgggggggttaagcatcaaacattggccataagtcactgggcacttcccaggcttcctccttgctgggtgagagtgaggctaccggtcagaggccttgtactttatacaacccctcccatccccactttttagagtgagcccctgctccagcttcagcaggggggatcatcccctccccacctctatcaccaccaccttctccctaaggcggcccccaaacatagcacctggctctcctagaacttcaggccccccattgatgcaggtggccagccacccagtgctgactaggtgggaggcttccaactacctggctatctaaatgcccgctgcttcaccagctgctggctaccttcctgcttagggcagtgtgactcactgacggattgacaaggaggcctggcaggacccatcacccagttccatccctctaatgctgtgtccccaggctcactcctctctacccagttccccgacctgcttacttgggtttggggtgtcaacaggatccaggcatttgatgccacaagtgtcaggacaacatctcttcttccctggacactgccagtcactctggcactcaggtttcttgtatctaaggcactgggcagatttcttaggaggacagactccagctttgaaggcttttgaagagaaagtcaagaggtcaggaggaggctgggtactgaggacccatcatgcctcctgaacaaagcaccacttttgagggggagagacccttacctcagtagctgtccacaaagcccaaagggtcatgcctgcctgatctccaggtgtattgatgggcttgattaaattagacaaatggacaggggacgtttcacacccaagaaaagggcagcaggcttctagtcaagacctcccacccaagagcaaaacaaggctacacaaaggcagagaggaaggctgggagtgatggagatggagagaggtaaacaaagataaatagaaccagtgtgagagaagttgagagctaaagcccaaggcagaagcacagagacaaaatagcagaagcaaagacacaaggaagcagagtcagaaactaatgatttgagagtcgcagacaggtgaagaagaaggcggagtatgagagagagagagagagagagagagagagagagagagtgggacctgggctgacagcatggctgcatagaggaagcatttccagaagctcaaactgtcacacaaaccttggagctcagccagacatgtattccaccctcagggaggtctcccgaaactaagctgagggatcagagcctacagaaggggacacacccacaccacaaggagaccccacctctgaccctgcagcccagattagaccagagtgactccaacttacactttccagagccttccacagcccaaggtgccagagttcccagggcaagcagcaccaggaaggggaagaggccgctggacttcatggtgaaggcaggagtgactctgatggccaatgccaaacctcactatttattctttcaccagtgggtgtggccccaccagaattctttcggcctctcccagctactattgcataagcaggaaacgtagccagagaccagaaatcctgacaccaaggagattgtttatctttcctatgccaggtaaggctatgaggccaacacagcaactatcagaaaagaaagggaagagattggcctgggaagttggttgattaaagaggccatctcagtgtccatctgagccctaaacatcacaagatcccaggccattagccttataggtggagagagggaagaagtggtcaattgcaaaggtgctacccggacctggaactaaaaccagacacagactccctgctgagactttgtgcaatacattctattctcacattgctaattctgattctcacattactggactctcaggcattgtgaaactctgctgattactcaatgcagtttctttctcaaaagttcagctcgttcaaccaactgatacttagttccctgaaatatttacaccgttatatccccagtgcctgttctgtgcctgacacaggaaaagcactcacaaatgaaagctgaagaagagctccgctctccacaaatctctctggagctcagttgtctcagctgtgaaatgaaatgatactaacaagtcagcccttctcagagggttatgaaattaagggcatgaagggactctgaatgaaaagaacaaatgaatagtatcccttcccactaaagagaattgaaatgaatctgagataaagggggaaagcagctcatcagtcactgtaatctacatttagctgtgagataatttgagatcttagaggattgcttcctaaaattccccaaaatcccttacagatctcacatgacagcaaaaaattaaacccattctatttgctacccagtctgcataggttgcttctaattataaagagagcgaccattatctctaaaattcagcccatagctgagtgtagggtcgcacacttgctgtctcagctgcccaggaggctgaggtgtatggattccttgagagtaggagtttgagaccagccctggccacatattgagaccccatctctacaaaaaaatgtaaaaaattagccaggcatgatgacgtacgtatgcctgtagtcccagctacttgggaggctgagccaggaggatcgctttagcccaggagtttgaggctgcagtgagccatgattgtgccactgcattccagcttgggggacagagcgataccctgtcttaaaaaaataaaataaaataaaattcaaccaaagctcatctagctacaaactccaagctcttgactcattatcttcatgcttggaattctcccattcattcctaaggtgaaggtttgtggaactttccacagacatgaaagacccactcattatcaagtagcgatggccccacatgaagtatttaagtattccacaaccaaacaggcaactggcagcagatccctttatacaaaagtcactccatggtttgaattttggtggatcagaagacttggacataatcaatcatcagtcaaattttggtggaaaaagaaaaggaagaaaattaatatgcacaaggtaactactatgagccaggtgcattcactcttagttggagtacttagtagggtaggtaagagagaaatggaggctatgatttccaccaatgggtaatgacactctcaggtcaagatttttgttctcacttccaccacccaggggataatttgatttctctcacagagttcctgttctctctctctctctctctctctgtttgttcctattttcctcagtgccacactcaagaaattatctggagttttctaaatatttatttcttaaagaatgaaaaggggctgggcacggtggcttatgcctgtaatcctagcactttgggaaaccaaggtgggcggatcacttgaggtcaggagttcaagagcagcctggccaacatggtgaaaccctatctccactaaaaatacaaaaattagccaggcagtgtggcacacacctgtaatcccagctactcaggaggctgaggcaggagaatcacttgaaccctggaggtagaggttgcagtgagctgagattgtaccattgcattctagcctaggcaacaaactgagactccgtctcaaaaaaaaaaaaaattaaaaggaaaatgctacagcttaagttttttttaaatctgtgattgactgattgctcaatctgtgattgactgattagagccagctcctttctcatcagaaaagagccctgtgcccaattagcaatgtcttccatgggtgtcataagaagataatagtatataatcattattatctttgacataattggttctaaatgtttacatcatagaatgttaagactaaaaagaggacttcaagggttttctagatcagcaaactacagtccttggaccaaatccacctagttacctgttttcataaagttttattggcacatagccacacatccattaatttatgtattgtctaaggctatctttccactacaatggcaacagggacctaaaatatttactgcacagcctaaaatacttatcgtctggtcctttacagaaaatgctaacccctagaccaaacccacagcttgcataaaagagactgaatcccttagaagaagatccaggcccaaagctgcatagcggattaacgacacacacaagattgagcttttctaaaacaggttactcacatgctgatccccagaacctgtctggtggaggacacttccactcctaaccaaatcttaacctgagactgactcattcaatctatctcaaggctgggagtggtggctcactcctgtgatcccagaactttgggagactgaggtgggtggatcacttgaggtcaggagtttgagaccagcctggccaacatggtgaaatcccatctctactaaaaatacaaaaatcagccgggcatggtggtgtgtgcctgtaatactcaggaggctgaagcaggagaatcacttcaacctgggaggcagagttgcagttagctgaggtcatgccactgggctacaagagtgacactctgtctcaaaaaaaaaaatctatttcacacaccctttattgccttctacctaaatcctatagattccttcattcatttatacaaaccattcacacaaaagttgtttaacatttcttaccacatgtcaggtattgcactaggcctagggctacagaaaagagcacgcccacggagtcgacaccacatggttgttaagaacctgaacttcaaagtcagacttacaggttggaagcaaatcactgaacctctttgaacttcagctacctccactgaaaaatgagagtgttgctgcctctggagtcgtacagttgttgtgaggagtatttggaaagcactcagcaaactgtctggtcccctcagtacattacacattgtttttattaccggcgtgtccctgcacacattaagcgcacagggagctgtcagtctttaactaaatagcttagtccttgggtctggacccatctggctctgtcccattaaatgtttgacaaaacatggtcttatttcttgacaaaatagacctgattgggcctattggtaggtaggtagacagacagatagacagatcttaactgacagatagatatagatagatagatagatatagatagatagatagatagatagatagatagatagccagataatcaactattggttctgtttctctggaaaaccctggctgatggaacctgcttgcctctgcacttcccaatgccatttattaaagttggttacatcattacttgtgaggctgcatcatcctttatgccttctctgaatactggcttccaattactgtctcaaatgttgttagtgtggccgcttgtccctgactaccagggtgctggtgacagggggaccctggcagctggtgggtcctgcacacaccaagtagcgggacagggaccctgcgcacctctgggagtctgcactctccctgtgagtatccacatacttgtggaggagcaacagtaaataatttttttaacaccatggcagatctagagagaaactgccaaagaaagttaaaaaattaattttagtaccgttaacactttttttcctgcttttgaacaagcagctccacattttcactttgcattgagtcttgtaaattatgtagccagccctggaggggctcagggttgaagtgagaggagcatctcatttgcacaagaaatgtctctgcctaatccattatggctcaacactgacccgagagagcataggtcaatcagaggaaaaaaaaaaagacatcaactgaaaagcccctttggagttgcacagagatggcctggaaagccctgaggaagagacaggagcagccacaggctcctgccaggagccatccaaggtggtaggatgactgccctagattctagcaatgggggaaggagtacagagtgagaagcacccccttggactagaacccatgcagttctcagtccaagctgggattctctgccccatggcaccattgatcctggctggcttcaggcactccaggggaacatagacaattttgaggaagacgccccaaggcacagagcgacctgaagtgtgaggtgcagggaaggagccccgttgctcaggtctaaggaagaatgtgtttcgggtcgccccattctgatagcagatgccagcttcacccttaactaaaagtcactgtgttcttacctaaaattcactatgtttccaagtctcaaaaccaaaaaacaacacagaacaaaaaactctttcagaatctggcagacaaccaggttttcacagctcattcctgtgtgaataaggcagcaactacctttccctgggcctcagttcctctacctgtcccaagacggtaactgtgactctaagaaacagcttcatcctgcttcctctgaggccatcagctctccccaagagcctcagccaattttctgactttcatagttgcctttataacttagcttaaaatattgtcttaaacaaaatacataaaacgtcaataatgaccaaatgggaatggagacacagagccagggagtatggagatgtagtaggtgtggtggggagagtattggggaaaaaaaaaccccgagctgagacaggaagagtagatgagaaagagatgactgcaagggaggtggggtcatttaaatcacctctggaagtgtcatccacaggtggtggacatggcaactggatctccctagaccttccagagaaacagatggcttagccactccttatcattttcccacccaagaaagtttgaattctgcaatgtttgtacttcctcccctactgctcatcatagtcctaataaaatctggaaatatgaactgtccttttaggcccacaagtgaatgggtgaagggcagtaaagcagaatctgggcaagggtgaaaaacatccaccatcaaagaattggcaggagaaattaaccaacaacggtggatctcaggtgtcttcatacttattaccatgcaagagatggttggtgtacagatcagggctctgcactttattccttcaaaaactgcatgtctgtctccctagaggaagggatccagttaacctaaggttaaagaaacaaagtctgtggtatgtcatgaggaaatgctttagggacctggtaaaacaaaaagaaaaacagtgctcggcattaagaaactgccatcatgactacccatggaagaaaaccgggaatagaaaaactggattattaaactgtggaacagagctataagcagcttgggaaaagatgtccccaaatcactagaatccatctcctttggtttagcatgttttgttacatttaagcgtcacacaaaacttggtagatactaatgtcaagtcagtttacagatgagaaaaagtgagtctcagagaaacgttcctgttgcagatcaggagatggtagggtcttagatggacatggcagacgatgcctggttgatcattactatgggagagtttggtgtctaagcctggggtcagtggagagcaccactatgaggacacctctgtggcccaaacagagcagagtgccagaaagaccatgaaagactcacacttgatagcatcacttctggcctctgggaccctgtggtcagctagagaggcatgacgatgatactggactcaggacactgggctggaatcccagctctgtccaatttgatgtagaaccttcctttctctgggcctcagtttccctatttgtaagatcagtgcattggaacagatgctctttagaggccccaagtcttagattctagctgggtttttgccttatagaggactctcaggacccagagagccaactttcctgaataaaaagcctaggaatagacaccatgcatgaccccgaacttcacagtggaccaagcacttttatatcccattttaaagaaaaggaaatggaacctcagagagtaagcccacttgcccaagatgacacagcaagtcagaggtacagtaagattcaaacccaagtcttcagaattcagccacatactgcttcattatggtccctccaagacttctttagtcctaaacccagagttggagatgcctgggatagtagcactgtccagataatccttcggcggaaagttaaaaaatgatcttaaagatgcaagaagtgagagtgctgaataaaccaaggagaataggtgctattttcaggtgcaatttgagcaagggctcaaactatagctcccacaagattctctccacggcacttctcttcatgttggcttcattcttagtcaggctccctcttagcatttataatatggctgtggcatctcctcccatcttcccaaattcatgtctagtaagggctttttctgggcaactcaactaactaggagtggctagaattaaatctttaaaccaatgattgggaccagggaactgggatgtaccgattggtttaagccaaggccacaatactcatcaccatgtgtactcatccccaaatccagtggaattttcagagtgggagagggaatgattctcctggggtaaattaggatatagctaccagcagaagggtgaaaggatgctcagtggtaaaaatagcagtgagtgttctctaaagtataccccttttggttactgaaatctacataactaaattttttcaaatactttctaaaccaacatctacataaaatgcactcaacctctctcccaaagaaagacaacaaaatgtctctctgggtactatattcatctccagttctgcaatgtgggtgaaagcagttctgtcagttaaatttatagtcttcacagattaagtttaataagcttaagtaaatttaaccacttcaaatgcacccaatatagaatggtagattgagggcggaatgactgcaataaaaagtcctatttgcaaaagggaaatataggaagatatatacaaattgtcactggcccgtaatacggattgtacatcctgtaagacagggatgtgaggacttcctacctaatgttggagtgatttccttactcaataaatctgaagaatccagttctgctgtctgggagcctctcctttgcctgtcaccttccatggctacatcttggaggagtattgcagaggatgcccttttgttggggaaggaagggcatctgcaccttttcaagaattcactttatataggtgcagcaggatgtggggatcgacatgaacaatcagtggccattatgaggcttggttttcatgtttagttggctcctggtccatttgcttcatataaaagcatgaactagtaactattgtcagaaatctcgccgagtcatgtttgccttttatttattctgctttactccaaatatgcacttttagtctgaagatgcatgtcttaatttaatcctaaaagaaaaagtcctttctttatctctttgaatattacttctgtgccattctctccagtctctttctggaacttccaccggatatttactagaccttctatttttattatcgttgttttgcctttctcttatatttttctcttcatctctctgtgctgggctctgggtgaatttctcagtactggctaaaaattcaccaagttttctttcagctgcatccagtctaaactctactttatccaatgtttttccaacttttattttaggttcaagggtacatgtgcagcttgttaacatgggtaaattgcatgttaatatttgatgtacagataactttgtcacccaggtaatacccaataggtactctttcagtcctaaccctcctcgaacccttcactctcaagtaagccccaatgcctattgttctcttctttgtgtccacgtgtattcagtgtttagctcacacttataagtgagatgatgtgatactctgtttttggtttttctgttgctgctttaattcacttaggataatggcctccggctccatccatgttgctacaaaggacattatttcattctttcttatgcctgcatagtattccatggtgtttatgtatcacagtttctttatccagtccaccattgatgggcatctagattaattccatgtctttgctattttgaatactgctgcaatgaatatatgcacgcatgtgtcttcatggtagaacaatttctattcgtttgggtatatatccagtaatgagattgctgggtcgaatgctagttctatctagtaagtaatgaatttttatttcaataatcatttatttccagtatttctacttggttttttttatatgttcatctggtaaatctaaataatgtacagttgtctgccacttttttaccaaattaggcaggacaacccttaggccaattgttaggtatctgcattctctgaaaattcagcctcattgcttgttttaaaagacatagaaagagacttagcatcaataaacaataagcacctaaccatagctctcttgtttgatgttgtttttcctcccatgaacataaatcaaattatcaatcagcaatgcctctatgtgcatttatgtttaaggtcttcctcaattagacagctaaccaaggtcatcccctacaaaataagacatacaagttataaattggtgcatgctggaaaggaattagcatgatttgcaaacctagagtgtgccttaagattttcccatagaaaatggaggcaattatatctctattctggtgtctgtaatcctagcactttgggaggccaaggtgggaggatcgtttgagcccagtatttcaagaccagcctgggcaaaatagcgagaccccatctctaaagaaaaataaaagaaaaaaataaaaatttaaaagaaaaaaaatcacttgtggagacagggcaaggagaagctgagaaaggaataaaaacatgggaggggcagcatgtccagtcatccctgttggtctaagagcagcaatgcacttcaagggagaggctgggtgtccacctccttcttttaccagaaggcttgaattcccttggctcgaattttgccatttgtgcaggttggattcttcttagcaattctggagagactgagaaaggtggttgccctcagaaaaaaacagtacaaagaagagttagagaactcatggatggggagagctgggatctggggcaacagcagcaaatgtctgaaccagaagtagaagccaagaaaattcagtggtggcaggagcattcgaaacctcccctcccaagaaatgatttgtgacagtgtcggattgaagaccaagatgtttctcacatttttcccccacgggctggcatatctccccaaagggagacatccatttactcaaggaccaacaaaaaagaagccatgacttgtcactaaggaagttgtgggccttgataagacatattaaaaaaagaacatggcctctgtggcggttgaacatgtgtttgctttgtaattgttcattaaatcttactcttattttatgtgcttttcctaatgcatgttttgttttacaattttaaagtgttgggagaaagaatgagtattggaaattaggcaattgtcagcaatgctggaacctacaggggaggccaagaggagaaagaaaaatgacctatcaaactctagaacaaggaggatgcagacccccaattccacagcctggactaacatctcccaaattatcctatatcctttcgcttgatctcagtgacattcattaaaagatcacagactttggaatcagactgaccagcttttaaatcctgtctttcccacttaataaatatgttccctttgataattctgatacttgtggctaataattactgagcatcttttttatgctggacactgtgctaaaggctttgcatgctttttcacatttaaacctataacaatgaataaagcaggtagtacagtatccaattttacaaacaggaaaaataaggctcagagtcggcctcctatacaaggtgacaggaggaaggaatgctttgggtgaatttgataggggctgtctaaggaataatgcttcttacccaggcctgaagagcagccatgattccctgtgcccaaagctggggtaaggagagagaaccactgagggtcaactcttcagttcatgcaactgatgtgcctgctgtacagatggtgcgtgagctccagatagaagcatcagttagcataaactgtctctggtgtcatcttgattaaaaataggacaatctccaattttataaacacatttttaaagttgtattttccacatttaagtcgttaatccatctggaatttatttttgtgaaaggtttaagtagagactttgtttgattttttttccaatatggaatgccaattgttccctatatcattgatcccccttttgatcataaaactgtattaattttgtaccagttttcatatgtggatggatgcactctactaggttttcttactcaatttgttcactcccagaccaataccatactcctttaatttgcatctatattttttataacctggtgcttcgcagtagaagtcttttctgttttgcttgtttagaattgttttggctatccctgtgcttttactctaccatgtaaactttagggtcaatttgacaaggtccttaaaaactctgttgaatttttattatgattgcatccatgctataaattacctggaagagccaaaatatttaccatagtaagtcttcccaagtataaaaaaataagtctcactctatttattcaaggcctcttcaagtcttttaataaaattttattttcatcatataatttttccaggtaatcataaattttatggctgttgtgaatagtttacccattgattctcttggatttcatcctgagacaatcatatcatttgtaaacactcacaattttatctctccctttccaatccttatacctctttatttttatgtccaattttattgcattggcctaagatcactaatatgagattgactgaaaatggagatgggagaaattctgcccttgtacctgtctttaaggatgccatttctaaagtgtcatcactgagtatatttgctgcgactgttggtaaataccttttaccagattagttatgttcacttttgttcctggtctagggtgtttctatttttattacacatgaatgtagaatacaatatagaatgatttttatgaaactatttagagactcatttgggtcatctttaaacttttaatttgcttaatccccttgatagattttctgttcttgaactatctttgcatatctgtttatttatttatttattatatttattatagggataccctactattataataaatgtcctagcatgtattatacttgtcactttgaaatatttcaaatgtatggaaaaaaatgggaagaacagtacaaagaactaccatattcccttcacccagattcactaaatattaacattttgccacatttgttttatcattctttctcttttgtgtgtgtgagagaatagaatgttttattccaaccattgagaataagttgtatacattatgctcctctgtccatgaatacttcagtgtgtattcgctatgaataaggacacctttatataaccacagtacagttatcaacttcaaaaaattcaacactgacaaaaaatcccaacattttggattttcccatgtattctcataagaaaaaagagtctagtttcttaaactctgattatgatataaacacacaatatcaaagataagcaccacaaaagtttccatccgtgctttcccttcttttagtctctgaaatcatttgggatagaaattgtctttcttgtaggtttggtaaaaaatgaatacatttcatattatttcccattttaaaagaagagatttaattaccaagtgaaaacctcttaacttgttttcttttataaaaggagaaatttaattaccattttaaattctttaatgattagaggtttgttcaggtttcaaatttcttcctggaaccagaaaggacaaagagaggagaggaaactggtcatgcctggtaaccactgaagcaattcatttcagacctgtgttacaactcctgataaatgaaatcaaagaggatcacactcatgtgtgtgtgatttctgaatagtgccccaaagaaagtgctaaacctgaccaacaacagcaacattctcaataggaggtggagtgaggattggtgccacaaggaacctggagctgatcctaaaggaaaataaatatctactagttgttgaccgatgtcactgtgcacttctctcacaaacaatgcctttattcctcaccaccatacaaaaaaggaattaatattaaccccatacatacatggtaaaattgacgctcagaaggatgaattcccgagcaatttggacataactcacacaattatgatttaagatatgatctgtctcactcaaaatccactattctttccactccacatgctgagagcaaggccacaaatcccaccacctctctcacttctctcctttcctcccatcatcccccatgtcctagaccatgggccaggtacagtggctcatgcctgtaatcccaatgctttgggagaccgaggcgggagaatcacttgaggctaggagtaacataggctggtcttgaaccagcctatgagacctcatctcaaaaagaaaaaaagaaaaagaaagaaaggatggaaggaaagaaggaaggaagggagggagggagggaaagaaagaaagagaaaaaagaaagaaagaaagaaagagaaaaagaaagaaagagaaagaaagaaagaaagaaagaaagaaagaaagaaagaaagaaagaaagaaagaaagagagaaagaaagaaagaaagaaagagagaaagaaagggaaaggaaaggaaaggaaaggaaaggaaaggaaaggaaaggaaaggaaaggaaaggaaaggaaaggaaaggaaaggaaagtcaggtgtgattatatgcacctgtagtcctagctacttgagaggctgaggcaggagacccccttcaaccgaggagttcaaggttacagggagctatgactgcaccattgcacttcagcatgggcaacagagtaagactctgtctcttaaaagtaaacagataaataaataaatatattgagtctaacagggtgggaaaacacttagataatctctagagagactctgactatactagtctaggcttgactcgtcagccatctcatgcccattcccaacccacccagagatcccgcaaacctgggagatcctaacaaaccattttttaaatgaagagaagagactatggcagaatctacagactgatgcaatccacatccatttcaaccattttttatgtatctctctatagtgcagaggctacaatgttaaaagctacattctccagaccccctgaaggtagggtcggctgtcatttatgtttcaccagtcagatgcactctcacaagggttgaaccaaggctaagttagaggaaagcagagtgtaggacatatattctgctggtacagaccatggcagaagcagaatggttctccagccgggagcttcctgaattgtagccaaggcaccatgactcagggggaggaaattttcctgatactcagtgtaccggcttctccttcagccctccaagtgattttgtaggacatctaatcctaataataaactttctgtttaaactagctagagtagttcctggttttgtaactgatgcttaaccaatatagaagataagagagatacaggagtttgcctgaggtcaatcagctagttgatgccagagctgaggttcgaactcaagaatcttaggatgtggccttctgctcccaacctcaagtaacctgaactcttgggacaccaatcagtggggctggggtaaaaggaattcttagggagatcctgtgttccccggttttagctgactcctcttcaccccattggtgaaggaggaatttctgacctagggttataaggatggccaaccacatgacacccattgctgaacagatgagatccatagctgtttatttttcacatcccagcctggggacaaggacactgcatgccacccagggccacagggagattgcacttgggagccccgtgtgccaccgggggctgtgagaggcaaggtttatagtgttatgagggtgagatgttctctgcctcccacaggagggtatgactggcttgcttgaataattctgcaggctgtcaggaaactgaaacccattcatcaggagtaagcaggacctgtagctggtcccttaataaagaggttgtttagctatgagacttttaccatgggaatacagtaaagagggaaacttgagattagtaaattccaggtccctcgtgattttatcagatgtcacggtagcagataagattgaatttgaattttaaattttggaccacatctccttgaacaaaattgttgagatgatgggaaaaaaaacagtgttgaagatagcagtgccaggcagctactccctcaaagggataaataagcaggtgacctcttattaatggcccagggcaccagcagttgtggtcataagtgagttacatgaagtcagcctctcctggatttttcacgatgtgaatacatgcttttccatacatgcccttacagtactagaattcatcttagcactggcctttcttctcacagttgtttgggggtttgggcatcacatactggcctctggtacttccagaccttcggcataacaagagagagcaagaccatatgtcatccctgtccctaggattctgccccaccacttccagtggatgcaatcaagcctgagaattgccttcaggaacaagcaaccaccctgttggccagtgttgaactttccctggcaatacaacccgtaatgttagtcagcttctggtctatttgcttccatggacttgtaaccaaagccaagtatcttgttgtatagatgttaattaattcattatgctccatatttcatgtatgcttttgaggtgatcgctcacatttttaattctaaaaaaatttttggctgggcactgtggctcatgcctgtaatcccagccctctgggaggccaagatgagtggattgcttgagtccaggagttcaagactagcctgggtgacatagtaaaatcccgtgtctacaaaagatacaaaaagtagccgagcgtggtagtgtgcacctgtagtcccagctactccagaggctgaggtgagagggtcacctgagcccaggaggtggaggtcacagtgagccaagattgtgccgctgcactccagcctgggtgacagagtgagaccccacctcaaaaatacaaatacaaataaaaatttttatctcctattacttctctaaatatcctcctctctcttttccctcattctaaaacttgaattgggtgcgtttacacactcttattttttccatatccatctgttcttgattcatatctacctggttttatttcctaatgtcttttatggatgttaagaaaacatgggtggatggatgtttatggaacctcttctctttttatggatcttattccttttatccccctaaaagtcttaaaattcttatttcaaggtgattttggggattaggctgttacttacattttgtctcgagtgacaattgttaagtttgttgctgtttcaagaggtccctaatcaaaatgccttttataatcctggaacctcccaacactaacaactatttttctcagtattggtttaaaagtgaaattaaattgagtatcacaattaagcaagttataccaagattggtgtacatttctcagaaacaaaatttatgtgttgcaacaaacaggacatgaagtgattacaaagtacctgtgagaagtttctctctatggaaacattgtgccagctggctgttttgtttagtttcaaagcacggtaggacgtgcctatggaacctgcctcaagggaagcagtggaattaacataggttttactacagccaatcatttgtgcatcaagagagatcgggaaagacaaaagaacacttcctttcttaaaaataaaattatagctgggtggggtggctcatgcctgtaatcccagcactttgggaggctaaggcaggcagattgcttgagtccaggagttcaagatcatcctggcaaaaccactgcactttgggcaacagagcaagactctgtctcaaaataaataaataaagttatgataaaaaccttctatgctccttcccaccattactatcctactattactaggactggaatcaatgtggtgatggctgaatagtgttttggaaacagactttagggcaacagaaaaaccatttgattggtttctaggtatcttggttttctaaaacttcagccttgtggcttgtattaaattaaccaaaattagctctaactcaggaaaaggttatcccttggttttgtcaactgtctgaaatagcttgctttcccagcattatttttatgcatatactttcctatttttgttggcagacttacctaatggaaggtttttgtttcccttctctgtgcccagtcttcctggtccacctacaattttgtggtcacctccgtctagtccccaagtaccctctgggtcagaatcaggttttatattagtagctcagagccatcctgacctggttcttggttctaaatcccaaaaccatagtgtgttagcactggaaggcgtctcgaagatcatctaggccaaatcaaccatttctcagcagaagaaaactgagacttgagaggaggagccctgctcaagtcacctgccaggtagagttacccccatgggcactccctggggcctgttccctgctgccacatgcctcttgactcaatctggcttctcgaatccaactgagccttctccagccagcatccaatacttcttcctaactcttgtttactcattcaatccctcacaaatgcctactgggaatacaaatgtgaataagaaacacatagacacaattacgactaagaggtaaactgtgggattagcatgacctgagttcaaagactagctcgacaatttgtttcctgtgtgatcttgggcaagtgaagagacttctgctgttttcattaacctatgtgaagcagacttattcatgcattcctagggttactgggacaagtaaatggcagaacaatcatcaagcacccagctcagtgtctggcttgcagtaagtctaaaagagtggttattattattatcattacaatgtccttcctgccaggttggatctcagaggggatgtcagtctcttctgtcacttcagacactcatctctggggagatctagttcagactagttgaccactagcccaacctggttctgtctcctctgtctaagactgcagttccctctccactgccttagctttgctatctttagctttggctggagtccctctactctgtgcaccattctctctgaatggaagctcagagacaagaattcttgggaacttgtttctgattcaatgcataatcttgaatggcttgggaggggtaaggtattgcccttcccaagccttaattttcccatctgtataaagagtgtgctgggttgtgttaagtcaaggtgaagacccctcctagcactgacactcctgggcctccaggaaatgccatgctttctccatccccccagccccagtagaggtgaacccttagccagctcccacctccaagcaggtttctttgggaagggcaggggtttctttcttagatggggccattctggctgtcccgattccactctgaggccttatttctctgtcagggcttctttatctgaggtccttagatcccttctgggatccataaatcccaggaaatgatatgccactgtcatgtgcatttttcagaggtgtgagttcatcagcttctcaaaatggcttagatcccaaaaagattaagacccattgctggaagtctagttcatgcctctatcacttaaattctgatttccttgtctgttggatgctcctctgatgttccccaaccttctccttttttctacattacatctacctgttaatctgtatcttcctgcactggactgagagccctttgagagtagggactgtatcaatctttttcacctctgtattcatagcaaaataacacatacccagtactcaataactagggatgctagctctatgaatgtaggaacctttgtgtttggttcatatctttgtcttagatgcaaggcataggacctgacacatagtcagtgctcaataaacatcagatgcagaaaataacttgtggaatgaacaagtgaatgcattcagaaagaagccacttcactctccaactttgcccatccctggggcccctaaaccgtgtctggacatttatggttttctttgttcttaattagaaaaggtcctttaaaaatgcgaacttataccaagctgggataaaggcactggcatatcacccccagtctggggtcaggcaactgggttggtggccagatgccctcatggtagtgttggccacagtgaaaaaaaaactctgctaagctggatgacaaagaaaaagattgggaaattaggaaaaataaggaaagatcagatcattcaaatcctccctgataatcaatgggtgacagatgacagatgggactgcaacatctcctacacagatgacaactgtgtggtccaaccattccccagctggggttttcccacctaaaccattcctgacttgtacttgttaaatgtccccccgcccccaatgatttcccagaataaaattctatgtaggctggtaagagggtgcttctcctcagtgatgaaatccctacagaggggagcttgaggtctcagggaagatgagacctggaatctgaggcaaaggcagaaaaggtttgtgttaaaagatagggaaatagactgataatgggagagcttgaatgacttccaccaacagtcaccccagaaatgatttttatcagagacataccggggcatttctggcaatctctcaagggcttagaggaaggcatcccatttatcaaattgctaatgaaggaagctgcaatctgtcatgaggaattgaagtttggagctctgacaagaccttgaaaaaaagaacattggagattaagtgtctgtcaaccagagctgaacactatccacaagagaggcctgggaccagagggggattctctaaactattaaaccttaaagcatgaatcatttttagttctatcatacatataatttacatttaataaaatgcacaggtttcaaatgtactagttgatgtgttttaataaatgtatacacacatgtaaccactgccccagcaagatacagaatatttccatcactccggaatattttctttgtgttcctttataatcaactttgctacccgctagggaataaatccctgccctaggcagccactgatctgctttctttcactattgattagttttgcgtgttctagaatgtcagatatatggaattatattgtatgtaatcttttgtctagtttttttggttaaacataatgtttttgagattcatccacgttgttgcctgtgttgacaacctgttcctttttattgctaagtaatattccattatatgaatatccacaatctttttatccattcttctattgacaggcatttggattttttctagtttggggctattatgaatagagcatttttaaatattcttttcaaatctttatatggacatatgctttcatttttcttgagtaaatgcctaggagtaaaattgcaagtcatagggtagatgtatatttaacttcatcataaactaccaaaattttccaaagtggttgtaccattttgaatttccagcagcaatgcatatgaattctagttgcttcacatcctcaccatcacttaatattgtcagtccattttgtcttagccactttagtggatacaaagtaatatctcattgtggattacatttgcattttctggtaattaacaatgttaagcatcttttcatgtgccgataatgaccattcatgtatcttcttttgtgaaatagctatttaagtctttggcccttttttgttttttgtcttcgtgtgactgagtcataggtgctctttatatatctatattctgttaatatacacatatcctttgcacaatgtaatcatccgttgtcaggtacatgtattgtgaatattttctccaagtcctagtgactgactttcatttgcttaatagttttttttttgaagtgcagaagttttaaatctaaaaatcaatggcagcctgaaaaaataacagctcctgaggccatccaactggctgtctgccccaggtacaaaaagaagataagactctgtcgtcagagtgagctgaggtccaattccacatgctatctctcatttaactctcacagtaaattttatgaattagttagttttatggtctcgttatacaaataagaaaactgaggtgtagggatgtgttcctatgtcacagtctaagagatatttcagacttgaggaaaaagtaagagtttctgtggccacttccatggtcaaaggagaggactgctggaagaggcgctgcctgtagccttcctgaagcaaatcatggagagccacactcgacagtggcgttgtgtgtcaaagaacaatggtagacagtactgacaatcaagggctaaggaaaaggctattgctctgatttgaagggtcctaataaaccttgagattcttgtaggagccaatggaaatgggagagaggctcaatgatgtaaatgacttatataccataccagtaggtggggtggggtaagacaagatttaatttaacttaatttagaaaaaaatcaaacaaaacatttcttacatccaaatattctagaaaaaaaaatctgttcctcacaggcattttccaatgctcttatgaacccttcctaaacatcactttcttatccacatgacattccatccagtaaaaatgtccaccacagtgtacttagccagtcccctactgcctgttcatgttatttctagtttttgctattataaaagccctaacgtaaatatcactcatcatgcacaaaactttttcctatattttatgtatttccattggtccatatttcttggggcagatgttcagaagtaaaactatgatgtcagtgaacaccaatatttataaattccttggtgttgattgcaagactattttccaggaaaactgtactaatttgcagtcccatctgcatgtctgaaagagactcagcaacattttcagtgactaactgggttttccatgtaccataatagagggaaggacaggggacaggctccagaccgcatacttgagtgttaagaacagtggccaggtagatactccatggaataaattattaggttatgttccagactctctccaggagtggcaagaactctgggcttgatttcagctgaccttgattctcggccctgctttgtcacttgctagttatgtgttcctcagcaagtcactgcttcctctttcaacctccctttaagttatctgcaaaacggagacaataatgcctctatctggagagggtcgtgaagatcaaatgatgccgtgtatgttcccactgtgttataaaccacaagctcctgtgtaggcttgagtcttctctgtatttggttgatgcactccattcctagaacatcagcatctctgatgaagctgctaagatcaagtttgggaataagaaaagttgaagactcgatcctagacccggccaggcgcagtggttcatgcctgtaatcccagcactttgggaggccgaggagggcagatcacctgaggtcgggagatggagaccagcctgaccaacgtgaagaaaccccgtctctactgaaaatacaagaattagctgggcgtgcaggcgcatgcctgtaatcccagctactcgggaggctgaggcgggagaatcacttgaactcgggaggcggaggttgtggtgagtcaagatcacgccattgcactccagcctgggcaacaagagcgaaactccatctcaaaaaaaaaaaaaaaaaaaattcctagactcaggagttccatcaaaaaagcccaaaattttctgcccttagcacaaacacgtcaaaagcctgaattcaatttttccccttcccaccttccggtctttttttttttttttttttttttttttaggtgtagagagctctgagaactgcctaccctgtactccactcaggatgccccccacagggtgggtgtttccatgttagtgcctttccccttttcaaataggggaatgagacaagactcactgctggactttccatttttcctaacactgccccccttaaccttgctaagacccaggtcaaaggtttaaagttatttctttcaatggcacttcacctctatgatcttccttctaaaacccataaccccagtctaaccataagaaaatattagacaatggcagggcgcagtggctcacacctgtaatcccagcactttgggaggtcgaggcaggtgggtcacctgaggtcaggagttgagacctgcctggccaacatggtgagaccctgtctctactaaaaacacaaaaaaattagctggccatggtggctcacacctgtaatcccagctactcaagaggctgaagcaaaagaatcacttgaacccgggaggcggaggttgcagtgagctgagatcatgccactgcactccagcctgggtgacagagcaggactctgcctcaaaaaaaaaaagaaagaaagaaaatattagacaaaccccagttgaggggcatcctagaaaacacctgactagtactcctcaaaaacatcaaggtcatcaaaaacaaggaaggtgtgggaaattattacagtccggaagagcttaactagccatggtgactaaatgtgaatcctggatggggatcctgaagcaaaaataaaacaaacaaacaaaaaaaaaacatgttaggttaaaagtatgaaaatatgaataaagtctggacttaagttataataatgattcaacatttgttcatttgtcgtgacaaatatgtcatactaaagtaaaacgttaacaataggatgagggatatttggaaactctctgtataatcttcataagttttctgtaagcctgaaactattctttaaaaaaaaaaaggtggggctattttatgtatctctttataggcttagttgaatttctcagacaaggagaaaaaaaatttgtttgtagcaaaactcctcaaagagatatccacacgtggtgtctctaattcctttctgcttgtatcaatctgttctggcactgctataaagaaataactcagactgggtaatttataaagaaaagaggttgaattggctcacggttctgcaggctgtacaggaagcatagtggcatctgcttggcttctggggaggcctcagaaagtttctaatcatgggggaaagcaaaagggcagcaggtgtttcacataacaggagcaggagcaacagagattagtaggggggtgggggtgctatacactttttttttttttttttttttttttgagatagagcttcagtcttgttgcccaggctggaatgcaatggtgcactctcggctcaccgcaacctccgcctcccgggttcaagcgattctcctgcctcagcctcccgagtagctgagattacaggcgcctgccaccatgcctggctaattttgtatttctagtagagatggagtttcaccatgttggtcaggctggtcttgaactcctgacctcaggtgatccgcccgccttggcctctcaaagtgctgggattacaggcatgagccactgcacctagccacacacttttaaatgaccagatctcatgagaactcactcactatcacgagaacagcacaaggggatggccctaaaccatgcaggagaaatccacctccacgatccaactgcctcccaccaggccccacctccaacactgggcattacagttcaacatgagatttggtggagacacagattcaaatcatatcacctcccatcctctctcgcctatgcctactccaaccagtctgcccccaccaccaccttctcatcactccactgacaatgtctttgtcaaagttaccattgttctccagcttgctaagtccatggtcagttctcatctctagtcctagctggcccaccagctgcacttgccatgggtgattgctcactcttccttgatttactttcttcacttagcttcaggacagcatgatgtcttggttttactccttcctcatggattgctccctcagtctcctttgctggttcctcctctcctccccaaacaccaaattctgtggatccctgggctcagctcttggtcttcctttttatccatactcatttccttcctttttttaactattattttaagttcaagggtacacgtgcaggtttgtagtataagtaaactcatggcacgggggtttgttgtacaggttattttgttacccaggtattaagcctaatacccattaattatacttcctaatcctccccctcctctcaccccttatcctcaggcaggccccagtgtgtgttgttcccctctatgtgtccatgtgttctcatcatttagctcccacttgtaagtgagaacatgtggtatttggttttctggtcctgcgttagtttgctaagggtaatggcctccagctctatccatgttcctgcaaaggacatgatctcattcttttttttctcaccagtatcgtagcttcaagtactgctgaatgctgatgactcccatatttgtatctccagcccagccctctcacctaaactccaaactcttatatccaactgacttcctaatgtctcaacatagatgcctcatatacatctcaaatttagcagatctaaaactgcattcctgagcctcaatttttttgaggctcatttgcctcacctgaggtgatctcacctgccaaaactgccttgcctatcccatctcagttgatgatgacatcatccttttagtcactccgaccaaaaatcctgacatcatctttgactcctcacttacttttacactccatatccaatccattaggaaatctaattcatcctaccttcaaaatgtgattataaaattatatatgaagtacctgtaatttcctaaattgaaatattattaacccacgcagcggggtaggggaaggggtccacctttccctccatctcttaatattaggatctaacacaaagtggccctggcgtccttccccgcttgaatgctgcctgcccccagcacatggctgcagcacattagcctccaaccctctgaagttctagctctaccccgcctaatttctatgtcctgtactcaccctgatgtgtccttcattcctgccccagcctgggctcccacctcccctcctgccatttcctccctgctcctttgctcttggctaccctggctccctcctgtccccacaatgcgtacatcttcctatacacttcacctctgaagtaggaggtgtccccagctggcctctcatcccagattatatgtcaatctagacaagtctccttgaattctttgccactgccaggtcccagaaagtctcttgctaagaccttgcaagccaatgaggttatcccagcttctcttctatatggctcccatttattgaagctgcaccaagaggtgagttcaggtcctagccttccccttcctggctgtttaatggggaaaataaaaacgcctacttcatttgccaattctgaggattaaataagatgcctggcacataacagtcacacaataagtgtttgctgttgttaccctgctgttactactgccctctgcaccacgcttcacatgcatgctctaatttaatccctgcattgtgggctgagatttacaaatcaagatgtactctcattttttttttaaagaaattgaggctcagaggggttacaagtgagatttttttgaacatgctgcagctagaaagtggcaaagcagagattcaaactcgggtgggcctggccctaaagtgttagcccttgctatatgatatactgtatcctcaaaatgactttctctggggaagagcaaatccataaaatgtacatacattcacactccttctaaaaagtaataaggggccaggctcagtggctgacgcctgtaatcccagcactctgggaggccaagtcgggtggatcacttgaggtcaggagttcaagaccccatctctactaaaaatacaaaaattaggcaggcatgatggtgcattcctgtaatcccagctactcaggaggctgaagcgggagaattgcttgaacccaggaggcagaggttgcagtaagccgagatcgcactactgcattccagcctgggcaacagagcaagactgtctcaaagaaaaaaaaaagaaagaaaaataggaagtaatatggaaatatatagcaaaaagtcttacagatgcttgtaccatttataaaatgcctaaataaaacagttggagttatgtataacaagatattattagtttctcttttgtttgtggaaatgcacatgatgttttagtcaattactatttctgctatctcaagacaactcctggccaggctcagtggctcactcctgtaatcctagcactctgggaggccaaggcaggtggatcacttgagcctaggagttcgagatcagtttgggcaacatggcgaaaccctgtctctaccaaaaaagaatgaaaaaaaaaaaaaaaaaactagctgagtgtggtggtgtgcacctgtagtcccagctactcgggtaaggaggatcacctgaggctgggaagtggaggttgcggtgagccaagatcttgccactccactacagcctaggcaacagagtgagactgtctcaaaaaaaagaaaaaagaaaaaaaaaacagataaaagaccactcctttctctgggttgcagggcataagaaattacaatgggtacacaagacatcaaggaacaaagagaccacaagtcctctgcacacctcccaggggcaacatgactctttgaaatagatgtgacaccctctggaggagggggacatgaacagtctctgttggggaaagtaactagggtcttaattttctcatttctattgcaaaatgtcatcatccagaattctttccaataacacatcagcccctttgaatttacctcacacattttttaaaggtgttgtttgcttactgtctgttttttcctttctactctctctcccatcctgttgtttctatatttgatacaaatatttaaattaaacatagtagaaggatggtttgcattagggcttatgttgcacttggccgtgatgcccagggcccaggtgcacgtgcctccaacagcagggcagacacctgttagccagtgatttttttattagaaaaataatacaagaacttctaattaaagatggcaaaatgaaagtgatgtagctccactttcttcttggaaacccacagccttccttctttgatgaaattagaaagcagtttcaatcctgggccacagttggttttgaagatgtggatgggagggtaacagggaaacccactggaaagggttaaggtgcagctcaagtgaaaacaatagaggtgaaagctccaagcacagagcctggcacatagtaggtgctccatggcccttattcatgaaggacgcttgttttcttcaagcagagggactgctaagcttgagccaggaggaagggtgtggggaagagccagcatgaatgagggccactgccaggagaggtgtctctttctctccctcacacacacacacacacacacacacacacaacacaaacacacaccaaaacacaaacacacaccaaaacacacatacacatacaaacacacaatatacacacacaaacatacaacacaaacacaacacacacaccaacacatacgtatggaaacacacagatacacatgtacacacactcaaatacatacacacacatatacatacacagaaacacatatacacaacacacacacgtacacaaacacacagaagcacaccacacacgcacacatatacatggaaacacacacacacacacacacacacacacacacactttctccacgagaaggagcagaatccaggccaaacccatggaatcagatcctggggcagaaccagccacgagtcagccagtgggcggggtcagggagatctggaggacatgtggatgacttggggggtggcccccactcaaaccagacccctctgtcctttgacatccccagccttcagtccaaaccctctgcctggcacccaacttgaggctggagagagggtgtggctgagcttcagccctgacaaaagccgcacctctctgccagccacagctgtggcccatgggagggagctagatcctgggctgggacctgaaaggtctggccccacccagcatggcgattatcttgacatgtaaacttgggcaagttactctccctctccagtcctgaattttcccttctgcaaaatgggagtagccacattgccttgtcttcctccaaggggatggttgtgtggctctgctgaactattcataataggaaattgctttgtgactcgcccaaaacattagtcactgtgattattagcatcatcatcattattgttcctcaatccacatgccaactgtcctccaccctctctctcctcttgccctctggaaagcagctgagttgacagtggaaggctccccagcactcccacgagtccttccctgacttacctctctcctccaagaacctctgccttttgccagctggtattgagtcaagggaaggcccccgctttcatcccaaacattctccccccgactgaccaccctgatgaagtggcaagagccctgctcatcaaggggctcactgatggtttgggggcatatctcatcctctctctgacctcagctgcctcatctgtagagggaaagtgttgatgcaaacttcacagtgttggcatgagcactacacaggatcatgtaagataaagagcccatttcaggccggatgcagtcactcatgcctataataccagagctttgggaggctgaggtgggaggatcacttgcgcccaggagtttcagaccagcctggacaacatagtgagatctcatctctacaaaaaatgaaaaaaatagctagttgtggtggcatgcacctgtagtcctagctactcagaaggctaaggtgggaagatcacttgagcctgcgagagcaagccttcagtgaactgtgattgtgccactgcactccagcctggatgacagagcaagaccctgtctccaaaaaaaaagcggggggaatagggtacaggtgggggctggacaataggctctgggaagcttgtcattgcatttgtctgtgtagtgtagaatagctaaactatccagacatccatcaataagaaatggttaagtgaaatacaacacatacatagagtagaatactacacagcccttagaaagaatggaggaaggcatggtcagagttcttggttgcaagcaacagacatgccacacctggctgatatcagacagaccatttcacaagtccagggtgtaccatccacactgggttctatgtaaatacccccctcctgctatgttttttgaaactgtgaaacttagaagctttgcaaagataccagggagtttatagaaataatgattagaggctgggcatggtggcttatggctgtaatcccagcactttgggaggccgaggcaggcggatcacaaggtcaagagatcgagaccatcctggccaacatggtgaaaccccgtctctactaaaaatacaaaaattagccgagtgtgttggcgtgtgcctgtagttccagctgctcggaaggctgaggcaggagaatcgcttggacctg[132 bp omitted]gtcagccgaggtcaccggcaagaatcatctggtcaggattttttcagtggctctcaatatcatccccatcgtaaatggctttccaactgttcctgcacctttggcttattctctcaagactatatccccaaggaaaaggcatagaataattaaacctcagccatgcattttatttattaacaaacactcatgtttgtacatactatataccaggcactgttgtaagaatgttaagtggattgtctcctgattgctttatttgaatttatttaatcctcacaacaattctatgaggttggtgctattattaacttcattttctgaatgacaacactgagacaacttgtccaatttatttgacaaataagcaaacctgggattttaaaccaaacaaactggttttggagcactacactagctgcctctacaggcataggagacgtctagaaggaatcacaagaaatcattctgtggtaatctctagggaataggattaacggaagcaggggatcttttttcacttgatcggttctatgctatagacgttttgtttatttattttttgagacagtctcactctgtcgcccaggcgagagtacagtggtgcaatctcagctcgctgcaacctccgcctcccaggctcaagctatcctcccacctcagcctcccaagtagctgggactacaggtgcatgccaccatgaccacctaatatttgtatttttagcagagatgaggtttcttcatgttggccaggctggtctcaaactcctgagctcaagccatctgcccaccttggcctcccaaactgctaggattgtaggcatgagccactgtgtctggcctaagttttattttaatgacgaccctggacggcttgtatggtgaaaatatttttaatacaaaggttttatctatctgatttttgtttgtttgttttagtctgtgtatgtgaagccaaaagctgagctagctctgagggaaggagggctagggcgcgcaatgagccaccaaggaattctgccagggttggagttggaaggacaatttgttgggggcctgagatgagaaggaggaggaggaggtgattgccgccagtcttctgcagttgctcttaaacttgagcctgcatcacagccacccggagggcttttggaaacgttgctgggccccacacccagagctttaaactagtagatccagggtgtggcccaagaatgttcatttctaacgtgttcccagatgatgctcatgctgctggtccaagatcacactcagaaccacagctctacccttatgggcagcactgtacaactttttttttttttttttttttttttttttagatgaagtttcgctcttgttgcccaggctcgagtgcaatggcgtaatctcggctcaccgcaacctctacctcccgggttcaagcgattctcctgtctcagcctcccgagtagctgggattacaggcacccgccaccatgcccagctaattttttatttttagtagagatgagatttcaccacattggtcaggctggtcttgaactcctgacctcaggtgatccatctgcctcggcctcccaaagtgctgggattaacaggcatgagccatcgcctggcagctctgtacaacttacagagcatgtgcacgttacctggtctcatctagtcctccccacagccctgagagagaagggggcaggcaagggcagggcagctatacctgctgtgttgctaaggggaatgaggggtgcccacctcgccgcagcctgccatgccccagttatccggtacccaccacccctccaccatcagctcccaccacactacctcacccagtgaatgccagctcacaagccttctctccgccccagaacttcaagctttgtttatcccagaaggcccccacatctgcactctctccccctggaacaatggaaggctgcctccctctcagacctcagttcaaatttcgccccctcagggagtctcccttgaccacctcacttaatcacctctcccctttccaggtgtcctctatacctgtgatgagtgacgcagtggccacaaatcacatggggctatttaaatttaaattatctaaaacagaacttaaaattcagtttcttggtcacattagtcacattgactgctatgttggacagcaaggatatagaacctttccaccatcacggaaatcctgtggacagcgcagctctctacccttactcaatttcatcatcttcccagcaatgatcactagttgaaaccttattcatttactgacttgttgtctgccctctcctagaacacaagtttcttaaagacagtgtaggactctctttttcaccactgaatccccagtgttcagcacagtacctaacatattcccaaagcaggtattcaagaaacatttactgggagggtattttggggggcaactgccaagattaggaattggagtcctgtaatagggaacaggggtcactcagattatcttgttcatctgggagaaaatacacctcaattattatctgcatagtgtagttagttgttagcttttttctgtctatatcctctattaatttccatcctcatctcagctgctgggaagaacacgcatgccctggctgcctagagagggataaacagcagcagttccattcaccgcttcaggaaaaagaaccatcttggacctgggaaagagcagagcaagggatgaggtgggctggagatgggattgtccatggcaggaggaagaacagaaagaaacagtggctcatggatccgggagttttaaatgagcttgggataccctagaatgaagaatcagtgcccagctctggactgacacagtctggacttaagtctctgctccacggcttatttgctgtgcaaattactttctgggactgggtttctttgtctgtaaattaagaataacaatatatttttctaattaagatggttatgggaattaaatgggttcttcataagtccttagaatttcaggcccttagtatatgttcttttttatcaccttttccaaagccccagggctgccactcacctcccgcaacaaaaaaattgcttcccagcagttgctcctcatacctccccttccagccttccctctcctctccagcacatgtctctggactaaaacccttgtgactgaacctgccttctctgcccagcccctggtgactcctaacaaacttgtaatgcttgccctggcattcacatttgctttcccatttgctgtttctcagcttagctcctcacgtccgctcatgtggggcgcaaggtctagtacacgcccacacccaagatcctgagaccctagtctgctcccctgcctggtggaggacactgagcccttgcccagcactcatgtccatcaccagaagctttgtgtctcctttcttcctctgatcacttgtgcagtgtcacccaggagctgggagaaacaaagattcctgggccccactgcaggatgctgcattttaacagaccctcaggtgattcataagtccatgaagtcttgtgggttagaaccactaacccacaagcccttgtcatgggatgcagcatgatccacctgggggactgagggcgactgtcttctccagcctcaccctccccacatgcccttgaaaagccactcgagtcctgtgcccaggagccctctcctcctttatcatctgcggaatgtctacccttccttgctggtgcagctcacttgccacctcctccaggaagccttcctgggctccataaagctgagctgcttatgccctcctctgtgtatttaacagcaatttgcttttcattgtgtgatgtggccgaacttcttcattgggcctggggatctgaagccacgccacttcaaatgagtgggagggtgtggaaaaagggcaagtaatggcctgcagagaaaggggcccttcctgatcatccactgtgcatgttcacattcatcaatgacttcgctctttccttttaacctatgaggttggcgttgcccacaggttttttttgttgttgttattgttttgtttcttggttttgtttgtttttgagacggagtctccctctgtcgcccaggctggagtgcagtggcgcgatcttggctcactgaaactctgcctcctgggttcaagcgattctcctgcttcagcctcctgagtagctgggattacaggcacatgccaccatacccggctaatttttgtatttttagtagagacggggcttcaccatgttggtcaggctggtcttgaactcctgaccttgtgatccgcccgcctcaacctcccaaagtgcttggcattacaggtgtgagccaccatgcctggcctgctcacaggttttacaagaggggacactgaggcaaaagtgtcccatggaggctgtgctgctgacaaacggcagagcggctcctgccattcacctgcactgtatctcgggctttgctttggtctactccataaacttcctgaaaaaggtttctttgaaaaagtccaaatttgtccctaataactgaagggtagaaatgtgaaatgggcctactctgggatcaagaccacctgggttcaaaccctaacttggaagctctgggccttgggcaactaactggcctctttcaagttcagttttccctcctgtaggttgagaggtttcaacgagacaacacagatgaaaggcacagcctggcccccagcatgcaggccagtgtttggtaattgatagttttctctcctgtttcactatcctaggtccaaagaaccagaagagtagacagtccttagagacagcagctgtgccggctgcagaaatggagagagctgtgagctagaatagaagaagagaaaggccaaaaaccacggagaaacagagccagacaacacagaggtgaaattcagaaagcgagtccagcacttggctgaagttacaggcccttcctgccctgccctttcccacccaaggccatgcctagttcatgttactaagtctaagaaacagctccagaagtggcatctctgctaaccactagggaagatattgtcgttttttaatgattcaaactctccagggaaccaagaaggctgagggcgctgagttctctccacacacctgggctcaggactcccccaatatctacgtgctttattcctgatcttaacaggctctgaaagccacataaacccgtgcttgcctgggtaccaaaagacccgggcccgggggtctttgttcgggctcggtgccttctccatctaagctttcttggcagtgttactctcctcacactgttacttgggttctcactttctgttcttgagttaatggatgtttgttttcctgaattcacgggtcctttgtaagtcttctatcccataacgtaagatgggggtataaacaaagaagcaagcgctagctgaccttatgtggggcatggttagggaacaggaattccctgtatccagcagggttaagctggtaggaggaaagggaaatgagagaaaggaatcaagaagtgagaaagggaaccagtacctgtcaacaccaacacacacctggtaagtagcagggctggtcttcaaatccaggactatggggccactgcatgggaacagaagcagcttgtagacttcggtggtggggctgccagagtcggggaattaagggaggacaggctctgcagcccaagtgccagatgccaacggcctgcgaaggctctaggacccagctccaaatcagtgctcccggcgccatccagtggccattagggagattgcaagagaaaaaagcatgagaaaagaaaccccagagaagccagtgcctgccaactccagggaagaggaaggaaggagcctggcctttgccctcagtgccccctatcagttgactaccctgctccagtttgacctccccactaggcttcttcctggtgcaactgatgttttctctctgtgtgaccttgggcaggcaactctggcctctaggcctcagtttccccaactgtaaaatgaatggtaaggcaaggtgaggtcacatgccaagtccataggtctttagctcatctgatcctcatggccaggtaagatgatcattcccatccccccatactccagtccctcctgaccacgcatagttcaagcttcactcacctgtaaagtcttccatggcctcctgcggaaattccagccaccgtttaaggatcacctctccaggatttctccctcctctcatctgaagttccctctttctgcaacagtcaggtggacctcagcccttctagcccggagcttcctcagctcaagagtttttctcaatcatcagtttctccctcttcaccaagcctagcaaggtgcccggcacagagtacttaagagcagctgctctgaagtcagtcagcctggcttcaagccccatgtggtaggcagaatggccttccccacaaagatgtacacattttaatccccggcacctgtgatttcacctcacacgacaaaagggactttgcagatgtggttaagatagagagcttgaggctgggcgcggtggctcacgcctgtaatcccaacactttgggaggctgaggcaggcggatcacctgaggtcggaagttcaagtccagcctgaccaacatggagaaactctgtttctactaaaaatacaaaaaattagctgggagtggtggcatacacctgtaatcccagctactcaggaggctgaggcaggagaatcgcttgaacccaggaggcggaggttgcagtgagccgagatcgcaccattgcactccagcctgggcaacaagagcaaaaactccatctcaaaaaaaaaaaaagatagcttgagatgggattatctttgattatcaaggtcatgccaatataaacagaagggtccttataagacagagacgggaaggtcagagtcagagaaagagatgtgctgatggaaactgagtctgaagtgatgtagggccatgacccaaggaattcaggtagcctctagaagctggaaaaggccaggaaacaaaagcctctagaaggaataaagccttgccaacacatcttagacttctgacctaaaaactgtaaggtaataaatgtgtgttgctagccactcaatttgtggtaacttattagagcagccataggaaacatcctggttcagcttcgtactggttatgttactgttggaaacttaacctttctgtgtctcagtgtcctcatctgtaaaatggggatgataaaggcaataattcttatttcactggttccaagtataaaatgaaaatacctgcaaatcagttacaataatgcccaacactaaatatgttagctgttactataagaacagttaatagctaccattaattgagggataggtacaaggcacatgccttagaagaatgtccttgattctccccatcacgcttgggggtaacaattccagtctccactttgcagatgaggaaacaaacacaaaataattttccccaaatcactctaggactggaagcattttaaacttcgttgtttcttacatgcactcgggaaatggtactggtttgtgttctttgctgatagaggtgttttgggaggggttgataagatgacagaaggaaggccacaggctggacagacaggggtcctagctgatacctccttctcttcctacctagtgcaggagagagttaaaatcggtcaaagctcatctatccactcccaccccatccatttaggggttcaattactgcctctcactttcccaccaacgccacccccgcaccccttaccagcgctcagtactagcagcttttgagccagatttgggggcatcatgggataggcgtggccgggagcgaagcgttcagtccgctggggaatggagtggcgcagacttactcagaccccaaggattcctgttgagccccctcccttcccgcagcctgcataaggagccatctgttctcggctgaataaacaagcagggggaagcagcgccgggtctcctgcccccgagcccgacccccgcacaatgcgcctttctccaaggagacgccgcccgggcgccgccacagcacgctccgtctggcttcccctcccccaggcggcgcagcaagacccaaaaacggaccccgtggaaatcagttttttttatttttttaagaacacaaacaagaaatccaacaaagaactgagcgcagcacgcggcgagggcgtgccggtctagcacgtgccccttccctcaccacccgctatccccctgacgccgcagtccgcctaatggtccgggcgaggccaactcagctcaatgccggaagcccgccagcgcctccgccccgacagcccaagccggacgggcccaggttctgcctggccccggcgcaccgatggcgcgcaaggggcaccgtccgtggtgccgcgccccagcccgggtctgggccgtccgtggccctcacttctggttggccagctggttctccagatcctccaggcgcgccgtcagctgggccagtgagcggttaaggaggccgttggggttcgccgaggtcccttcactttccctccagcccgcgccaccagccccaaaggatatggttcagcgtcaggctctcgagcgcccccagcgtgcggccctggaactccacgaggctttcgcattcgcatgggctccgaagctctgtccctgcgctgatgccctcctctgcaagccggacacagagggtcagggggatgagaaattgccctagctttggccctctgatttccctgcactgggcctatggttgagtatatgggctttggatttagagagacctgggctgagtcccaagctaagtagctgtgagatactgaaaaactcactaacctttctaagctcagttttctcatctataaaatggatataatgaaagagtgtacgcattagtggcttcgaggattcattcacctgtgtacgtgtgtgtgtgtgtgtgtgctcacgcacaacttacaagactgtttctcaaaccttaatgctcattggaatcatcaggagagcttgttaaaatatagattctgcttcagaatggagaagaagctcagaaggtacatttctaataagctcccaaatgatgctgatgctcctggtctgtggaccacactttgtgtagcactctccaaataaaattttatgcaatgatgaaagtgttctacatctgccctgtccaaagcagtagctacaagccacatgtggctgtttaacacttcaaatatgactggtgctactaaaggactaaaatgtattttattttaatcaattgtaattaaataggtactgcctacctttttgaaaaagcacagatctagaacactgcctggttcaagtaaatactttacagcaggggtccccaatccccaggccatggaccagtaccagcacattacatggaccagtaccagcccatggcctgttaggaactgggccacacagcaggaggtgagcagccagcatgcaagggagcttcatctgtatttatagctgctcctcattgctcctattacaacctgagctcctttcctgtcagatcagtggcattgttagattctcatgggagcacaaaccctattgtaaactgtgcatgtgagggatctaggttgcaggcttcttatgaaaatctaatgcctgatgatctgtcactgtctcccatcacccacggatggcaccatctagctgcaggaaaacaagctgagggctcccactgattatacattatggtgagttgtataattatttcattgtatattacaatgtaataatagaaataaagtgcacaataaatgtaatgtgcttgaaccatcccaaaaccattctccccaccaccatcatggaaatattgtcttccgtaaaaccactgcctggtgccaaaaaggttggaaaccactgctttatagtgtatttcaactagaccagtgattctcaaagtgtggtccttggaccagcagcatcggcatcgtgtaggaatttatcaaaaatgctaattatcagacaacaccccagacttgctgaattagaaaatctagagttgaagcccagcaatttgtgtttgtttttgttttgttttttgagctctgtctcccaggctggagtgcagtggtgcaatcttggctcactgtaacctctgcctcctgggttcaagtgattctcctgcctcagcctcccgagtagctgggattacaggcatgtgccaccatgccctgctaattttttgtatttttagtagagacggggtttcactgtgttagccaggatggtctcgatcccctgaccttgtgatctgcccacctcggcctcccaaagtgctgggattacagccatgagccatcatgcccagctgcaatttgtgtttttaaaggtccaccaggtgattctggtgtgacctaatttttaggaaccactgatcctgatccaactctatctccccacacatcaacatcttgggggttgggcaggaggccttacaattaaaactggcacatgttttttcttagcagtacataaggtagtgatgaatcttaaaatgaatggtatcttagattcactgaaattctataagcatgtgccattgttaagattacagggaggccaggtgctgtggctcacacctgtaatcccagcactttgggaggctgaggcgggtggatcacgaggtcaggagatcaagaccatcctggctaacacggtgaaaccccatctctactaaaactagaaaaaattagccgggcgtggtggcatgcgcctgttgtcccagctactcgagaggctgaggcaggagaatcgcttgaacctggcaggcagaggttgcagtaagccgagatcgcaccactgcactccagcctggatgacagagcgagactccatctcaaaaaaaaaaaaaaaaaaaaaaaaaaagattacagggaatgacatagaaaaaaaaaatgctacaataaaagtaccttaggaaaaaaaagaaaaaggattacacgtggtgaaataataagcacaatacctgccatttaacctttgaaaacactgccataatgatttaaaagttgtctcttcatcttagtcttatatgtactatgaacaaactgctggaatccagcaaagacccctaacttcacagatttgtttctctaaacaaagggttggagacagggaacagtcataccaccaattgataaagagcttcaaccacaaaacccagacttctcttagaactctagaactagaggtaaccttgggcagccagtgcctctcctgttaccgaagagaaaagttaaggtaggtgtggggtaagtgactcgtccaaagtcacactgcagggcccataagagtcacataggaagagctctgaaagagcccctaatctgaaagagccacaataattagaattggctgagagcggggagggaaggagagttgggggaaggactgtatgtgtatatttgtatgtgtatatacatgcacgtgcatgtgcatgcatacacaaacacatattatataatatagtatatatagtatattatatatactttttttgagacagggtctcactctgtcaccaggctggagtgcagtagtgcaatctcggctcactgcaacctccacctcccaggttcaagcaattctcctgcctcagtgcccaccaccttgcccagctaatttttgtattttttggtaaagacagggtttcaccatgttgccaaggatggtctcgaactcctgatctcaagtgatccagccgcctcggcctcccagagtgctgggattacaggtgtgagccactgcgcccagcccccctacatatatctaaaaaaaaaaaaaggcaaattctccagacccaaaccagccctacttagtctgtttctggagctgcagtctgataaatgggaagaagagtcacatcttaagcctgggctagtgtctaaagtctctagggtaaaagttaccctggagacattccctgtatcacctagagcacagtacactgcatgcgattcaagagtccccttcttcacaggtagagtcagtctctttttcctcagctgagcaccagatgatgaagtagagggattgcacttatgaggtatgttgtccccaataaaaaaaaaaaaagtctttgcatacttaaaatatattcagtcctgccactttgccaagttcataaggttgaattctaacaagttcagggatatatgctgtggctccacttacaaatgctgtctggtgtgccttcaaaaaaatttcccaaattattctgaacctccactgatttgggggacaggtagcctagtctaggatttcttagactttaatatgcttacaaatcacctgagaatcttgtcgaagtggaaattctgattcattcggtctggagagcaccagaaatgtttcagttctaagaagctaccgggtgaccgccctgccgctggcctgcagaccacatttggagtagcaaagctctgtctagtgagcccaacctctggctataactacaaagtgggcagggagtgaataggaaggggagatatcagaggacgggcaatgagagagaggaggagccccgagagagatgcgctcacctggacagatgctgcctctgaggttctccagcaggtgcgtcatggtgccgaagtccggggcataggacacgtgcagttccgctggctccgaggcgatctcgcgcagctccgcctccaccgccttgcccacgcccacggcgtacatgacgatgcctgcaaggccggggtctcagagggtgccccaggcctcgggaaagctgcctcccagcgtctgacccaaccccagcccactgtgtcccatgccaagcccaccttcctccttggcgcgcgctgcccacaccgagatgtcatcctgggagcggccatccgtgaagaccaggccaacacgaggcacgttaagggcacggggccgtgcaccctgcgcctcggagaagctgtgctccaccatgtgccgcaacgccagccctgtcatggtgccgcgttccatgtactccacggccaggaccgcctgcttcacctcggctgcggtgccgtagcgacccagagggaactcggtgcgcacgcggctcgagaactgcaccagccccacccgcgtgccctcgggggacacatctaggaagtccacaatctggttcacgaagcgcttcactagctcgaagttttgtggacgcacgctcttggagccatcaaccagcagaacaaggtccacgtggccttcccggcaccctgcacagccagaaaagcttgaattgagggaccagattctggactggcagcagctgtctatccatctagtcgttcattcgcaaacatttattatataacagacaacatttcctgagtccttcctgtgccaggcagtgtgctaagtaataataattatcaccatcatcatcaccatcaccatcatcatcaccctcatcatcgcccttgacatttattcagtgcttagaacaaaccactctgctaaaagcatctttttttaacaacaatcatagtaatgaccacaataactaccatttattgatcatctactatgtatcaggcacacttctaagcactctaccagtattaacaataataataacaaaaacattatttaccgacagcttaccatgtggtaggtactgggtgaagtgcttatatatattctcaatcctcccaataagcttgaatattgtccccattttctatgacctgaggttctgatggataaagtgattgccccagatttcatagctagtactgactgagccaagacatgaagccaggtccatctgactccaaaacccatgctcctgaatgactctacaatgtcacctcccctattctgagccaggaaagttgctaggcccaaaatgtggtgtgtgttggcgtggggaggttttcaaaggttttgaaataattaaaacataatcctgttccatgaggacagagcagagcaagtcagacatgctatgtgctctggtcaaggaaagtgctagaagagaagatcatgcagggatcccaaggtaggaatagtgtattcttcctggagttgttaaggaaggctgcatggagatgatggccttctatctgatctttgttatgaactgaatgagtgtgtttcccaaaattcatttattgaaaccctacgcctttatgtgatagtctccggaggtgagatctttggaggttaattaggattagatgaggacatgagggtacagcgcttatgagtaaaattactgtccttgtaagagtctgaagaggtcaggcatggtggctcccagcactttgggaggctgaggcgggcagatcacttgaggttaggagttcgagaccagcctggctgagatggcaaaaccccatctccactaaaaatacaaaaattagccaagcatggtggggcacacctgtagtctcagctactccagaggctgtaacaggagaatcagttgagccccagaggcagaggttgcagtgagccgacatcgcgccactgcactccagcccgagaaacagagggagacttagtctcaaaaaaaaaaaaaaaaaaaaaagtcgaagagggcttgcttcctgtcttcaccatgtgaggacacagcaagaaaattggtgtgtgtgggtgtgtgtgtgtaggggtgtgtgtgtgtgtgtgtgtgttggcgtggggaggctttgaaaggtgtgccatctaagaatcagaaaacaggccttctttagacaccatatctgctggcaccttggtcttggactcctcagcctccagaattgtgaaaactaaatgtctagtctacagtactttgatatagcagcctgaatgatctaagacagtcttgaaagatcagtaggagtttgccaaggcagtaagggacagtctagaaggtgagatgcagcacgtgcagaggcttgggatctggggagatcctgacacatccggggaggggcaggccagtaagactgaaatgttcaagtgtggcaggagatgggcagatggagttggctgaagctagatcgtgatgacctaaggcagtggtttcaaaatttttatcacagcccacagtaaaaataataataatgacaatacatcatgagacatttcacacagaactaaaatttcagaaataatataactctttctacaggcagtaaactctatattgtcttccactcttttttttttaatgttggttgtaacccagtaatttgatttcattattcattaatgtggttctgctcaccatttgaaatacttaggggtaagtcatttgatctttctcctgtagtcattggtgagccacagaaggcttgtgcacaaaggaggaatgtgatcaaatatgtatttttaaattaacattgacagcagagtagaggattgtaggaaagagatggaaggagggaatggcacaccctccaatgtcacccccacaacacacacagacattcacaccacagcctaggggccacagcaatggcaaagtcaaggacactccaaatgtgggcaatggggcagaagccaacagaacaccctcccgcccatcactcacggttgcagctcttgccatctgcctgaagttgccgcccctcggggcacaggcagcggtaggagaggccctcgctcacacactggaactcacagccatggtccacgccattgcaaaggtcccggactgaaaggagagacaggtcaggatgagtcaggatggaccccaccagctaagatctcttacccctcccacaaatgtaggagagccctcctcaccctgacagctcctcccatcaggctgcaagtcatggccctctctgcagtggcaccgtggcccaccaggggtgctaacacactcatgctgacagctatggttcccaaagctgcagtagtcaatggctggcaggagggaagaaacagcaagatgttgcctctgattggagccctcggaggccacagtccagggtgtggtgggagggtgggggtgttgctcacccctgcagctcctctggtcctgctggagtacaaagccaacttggcagtgacagaaataggagcctggggaattgacgcagtggtgctcacatccatgggtcccttcagcacacagatcaatggctgaggaagaaatggggtcagtctatgcccaggactgcccttctcagctctggtagcacaaccacctaaggaaattttaaagaatacctacgcctgggccccaaccccaaaaatcctgacctaattagtcagggcccctgtcctcaagatgctctctgacttacagaggacaggtttggccactttacctatttgagcctccatttttctatttgcaaaatgggaatataatggaagacagtgattgctattcacagcttccttccatggaagatggggaactattgccctgttgagcatcttgatgatctggataggcaaagatggccgagagctggactggagagaagataattaccctgtataaaaaagtgagtatttggggttcctggaaaggagatgagagtggagagaggaaagaaaaaaaaaaaaaagaacaagagagccagtatgaagatgagtaactctgtgggttgaggctgcctgtgaaaaatcccttgtactaggctgactgaggactttcagaaacaaagctgtctaatattcaattataatgagtttttcgtgtgtgtgtgcacgcgctatgagttacttagcacatacacgcttgtgtatgcccctgcatacacaagtgtgtaaaccaacgaagaggttgattaacatgcatggaacaagaacagcatgtgcagggttgagaaatgagagaggatccataaatcaaatgaatttagcagaggctcacagcaagaggtgacaaccagaagataagcacttgggggatttccagaggtcttggagagagatttgaatgttaaacagtcatcaaatcagagttcaagccaacttttagtttctagaaacaagaagaccccagctgacatctgggttattgggattacatgatttctttttccaggttgttgtgaggctgagagataataacatgtgtaatgctcctagcacaatgtctaatactaacttggtactcagtaaaaaactgaattgaataagcgaggtattctatgccatagcttttcagaagacaaaaatgaagaagcagctcacacctgtaatcccagcactttgagaggccaaggcgggaggatctcttgagcccaggagtgtgagaccagcctgggcaacatagcaaggccctatctcttaaaaagagagagtcttgaaagatttgcaaaggcagaggggagtggcaagggcagctcaggtgagcagcacacaaagagctgaggtgcagagtcaagaatgggtggcatgaggggggacacccacctaattgaagaccccccaacagtatctaagaagagaaactgtaaggatgtgcctgtaagaagacagaaatggccgggcgcagtggctcacgcctgtaatcccagcgctttgggaggccaaggcgggcagatcacttgaggtcaggagttcgagaccagcctagccaacatggtgaaaccccatctccactaaaaatacaaaaaatagctgggtgtggtggccagcacctgtaatcccagctacttgggaggctgacacacaagaatcacttgaacccgggaggcggaggttgcagtgagctaagatcgcaccattgcactccagcttgggcaatagagccagactctgtctcaaaaaaaaaaaaaaaaaaaaaagagagagagaaaagaaaagaagaaaacagaaacaagtttgggaggttgattagagactggcctgaaaacagggagaaagagggcagaaagcacactgaactgtgggctcccaccagggacttatgtgaccccaggcaatacctttctttcttaggcctgtaaagtgatggaggtgtgcttttactgccaaaggcccttccagactcattggtctgatgttggggcaatggagagccaaagaaggttcaggagcagtgagattgcaggacagggatagctgtcatccaaacagctcttgttatctgctgctagcttgtagcctgggttgcaggtgcagtggaacatggcccaggcattgacacattggtgctggcaaccatgtcccccctcagcacactggtccttccctgaggacacacaggactagaatcagtagggaacagatgggcagaagcctccaacaagagagagctggatggggatggggtcagaggcaggcatcaccctcaaatggctttcagaaggaaatgactaatttgagaagggccgtaccaagtgagagggcttagggaaagaataaggcttaaggagcccctgtgagtaggctcagaagaggagacactcaattagacacgtcagtgggctgggacaggactacacaggggcaggagtgggtaggaaggtggagaggtgctaagtcgaggtgggcggaataaactcaaaacagatcagaacagatcttgcagcatttgtgggaggagctaagatgataatgggagaagtcatccccatgtgggagggccacgactctttggagcagccgatccctcttagctttgagaatcactggttccgtgtgtgcagggggttggtgctggaatttgacattaagcctgtggtaagctgtggcgggtagggcaagaaattataggttgctccttgttgatggaggctgagcagaagtggtcagagctgaaatctgacacagcctgcggtaggtcagggcaactctacctggaaatcgcggggccacccccacgggatgggatttactgtggtgggaaaggaatccaagcatttggattgagagttcgagcttcactccagcgccctcctaactcaccacacagccggctctggaactgcaggccgaactcctggatgaggtcgaaggactctacgaggaagacgtgctcgtctagcgggggcgatgccatggcgcgcagggagcccacgtccgcgcgctgcacccccaccgcgtaaatttcaatgccgcgggcgcgcgcctgtgccgccacctcggccacgcggtcctggggccgcccgtctgtcacgatgacagcgacacgcggcacgcgctcctctggcggtcgcgcgccctcggccacactgaaggccacgttcatggcgtactggattgccagtcccgtcatggtgccttgcgccagaggcaccaggtcgcggatggcgcgctccatgtcctcgcggcgagagaacgcgcggagagggaagacgctctgcacttgactcgaatactggatcacgccaacgcgcgtggcgttgggacccacgttcaggcctcggaggaggcccatgaggaactgccgcatggtctcgaactcgaaagggcgcacgctgcgggagctgtcaatcacgaacaccagatccaggggcccagtgtgacacctgggacctgcggggagatcagggaggactctcctaggtcagcaaagcctcacctccgaggagaccccctaggaaacccaggggaaatgccgctatgccgacataacagcgcccagcacagcaaacgcagattagacagatgcactcgcccggcatgtgcctagcacctgggctaggagatttcacaaattccctcatcttacagatctgagggctattctgaggcggtattacccattgacgagggggcaaggaagcgtcgcaaactcaaagcctgcagggaccaggcagggaacatggatgaactggttgggttaggacgctggagacccaaagagcccctatcactcctaaattgggcaggtagctgcatccaaatgaggccatgcccctgcgaattggatgtcagcagatccctggtttttcaagagaaatactaaacagggatttttatgtaaaatttcctggtttttttccatgttttcaaataatttttccaaattaaacaccccatgggcagttctgcatgcgcccaaaactaagccacatcctacagatgaagaaactgaggcccagaaaggtgaagtggggaacttaaacccagtcccatatgttccaaagcccttgcttccctctccccagcaggaggagctggctgcagagggaggacctgcttccgctcccctcctcccactggtgagggctgggccccagttcacctgtcaactggagctgggtttcccagggctgaagaaggagcagcaacacgggccagcaaagaaggcctctcatggcgcttggggacagagaatggaggtgtcagagcctggagggaggaaggaaaatagaaaagcaacagtatttacagagctcttattctgggtgataggcacttggagggggaagacagttacaggtttattttactaatctctctatttttgtgtatgtttgaaatgtttcagaattaaaaaattctcatcacagtgggattgctgggaaacacaagagattctttttttttttttttttagatagagtcttgctctgtcgtcccggctggagtgcagtggcatgatctcggctcactgcaacctctgcctcccaggttcaagcgattctccggcctcagcctcccgagtagctgggattacaggctcctgccaccacacctggctaattttttgtatttttagtagagagcgggttttgccatgttggtcaggctggtctcaaactcctgacctcaggtgatcctcccacctcggcctcccagaatgctgggattacaggcgtgagccaccgcgctcggcccacaagagaatggtaaataagaatagatacatagatacaaatatgcaaaatttaaacagaaaaaaacaggtcttccttaaatgtcaggcacagtgttaaatgctcttcacgcattgtggcatttaatcctctctgcaattgtaagactaaggctgtgattgtcccccatcatacagacaatgaaattgaggctcagaaaagttaagcgctggtacccaaagtcattcggccaaaaagtggctgcggcaggatacaatcccacgcctgctagtttctgtgagccagcctgggcgtttggtgcctctcctcctgccaggcgaacctctgcagacagaagcccttccccacctcggcccactcccctacgcacacaggcttctgtgtggctgtctttgcaactcgccaacccccccagacccctccacacacacaaacacagacatgcactgcccaaccgcaggcggcagggaggggctgcgccctgttgcggggctgagcgtggtggcgtggcagcgagtggaccaaaacccactgcgcacgagaacgcgcggcttggcgcctgtttcccgcctgctctcaggagcgaccgccagggggcgcccgagatggcagggggcgtgggaagcccacatctgcccagcaggtgcgcccaccccgagcaaacagggggccggggcccggggccttggagataaggcctggacaggatataacccgcgcaagagccgaggagcaggggtgtgcagggttccagcgacagcagcactggactcgtccagagggcggcgggtgagcggctggggccccgtggagccaccatggaccccgcaggggcagcaggtgagcgcttaccctcccgaggccccggagacgccccgtgagaactacgaaggaccacccccccaccccctccccactatacaaataggaaaactaagccccaaggaggcagcccgccgaactgcaaaagcaggattagaacctagggctcctggttccccttctctctcttgaggccccctggcgcctagaattcactaaacctcatttccttccagctcctaccccaccgccgcgccccatgctgaagctgtgttagccatttttctgttgctgtttcttggcagagagggccagctgcccctaacccaacagcagctccgcccccgccccccaattccgtgaatgcgcctattctgagcgaggccagtgcctgcttctcactccaggcgaccttctcatcccggattcttctcccttttcccctcccaggcctggtagaagaacataaatcctctggcagggcccgtcgtgggagggtgaccaagcaagatgtggcagcgctggtggaagtgggagggcggggaacccttgtcaagcttgggccacaggcaaagccaacatccctggacagcatgagggctaaggcacaaggggcctctgccacctcccatactttcctacccggagatgcctctgggcccctaaatcttggttaaggttcccctcatcccattcttggtctgagccaacttctcacctggcaccctgcctccaccccaggaatcctagaaagtcaaaatagcaaatgcctcaaagttcatcacctttccaaacccctcattctacaaagaaaggaactaggtccagagagggtagtgtcttgctgaagggtacatggcgatgtcgtggcaggactgatactagaacctgggattcctctgaggagttaatccttgcattaaaaaaagaaagattcagagatgccctgaggtgaggttgagggagtggagcagcaagggaggagaggcctgtaaataaattctcaaaagtcccttagggacatttcagggggttcctggagggatgagagtagaaaagggatgatcctattttgatggctttgagggtgggggctcgatttggaaaggaccctgcagaagtggggaagggcactgcaaatcagatagggcaccctaggcagcgtctctgctaaaatacactcgcctgacctggcttgatgcctactcccctgcagacccctcagtgcctcccaatcctttgactcacctgagcctgcaggacagatcagagatgcagctgcagagcgaagccgacaggcggagcctcccgggcacttggaccaggtaacggcggcgtggcagcgtgccctaggtggggactgccaggcagctggagcacacagaggcaacggccgcatttaacccagggctggcgggtggggaggggaagtgcaggctgcaacccctcccactggcagggagggatccccccttcctcctgagggggggcaaacccagcaccccctgctcctaccacgcttggagctgcagacagggctagctgcgggccaggctggaattcagctacagcgggagactggggagaccggggcagccacactccacagccggaattcattggaagcttagaaggcacttccctgaggagagccccaaggggtggagcggtcctggctgtggctgctgcctgtctggcctggctttcgagggtgcggtcttgcgctgtcccctccaggagtgaggagagactctggtcctgccaagaggaataagggctcagaaggacagcctcagttttcatggctctccttgggcctcaacctgctaaccccccaaatctctcccacctcccctcctctacttgctccctgcaattgctcgggcctacccacccacaccgctcaagacccccaggttaagaagccaccagacctctaggctctaacctggctcactctgcaggaccaatgtcatctgccttgactcctgtaatcaagggtaggaaagcccacacagcaacaggccacttctcatgggagaaagggaagaatatggctttggccccagaaaggctcagattcccccaggccatcccccatcctgaggacaaggttttgggcccttttctgtttgcaggcaggaggctagagagcgctccaggccaggagcccaggaaaggctctcccttcccctccctcctcaccccccaccctgccttccccagggtggggaagcttcatctctaccaattccatcagccctaaaatactcttctccatcccaaggccagtataagtgcagcctttgtgtcacagccacgtgtccctatggccctgggctccaatgggcatgatgccagacccacagagtggaacctgggtggtcccatgggttccatgcaggcttcgttgagcaccttgcagcctaaatatttagcctacaatttgcagccaagtctcctccttacctaatgcttcctcttcctgaccccacaggggcaggatatagagcagccccaccctcccactcactctaaccccctgctcacttcattttactcaacctgagtgcttggaccctgtgccaccttgacccttctccctcctgtggctggtcgacctgcctgccctactcccaggtcatccccagagcacaccaccattctgaggggaggcgtgcgcaggtgcctgcagcaacagtgtgaacagactgtgcggatcctgcatgccaaggtggcccagaaatcatacggaaatgagaagcggtaggtgcctccgcagcccctcccaggtctctgcaactgtcagccctatgcacctcctccatccacccattgggcctcttttagacgcagagcaggcctcagggctgagatctcagctattggtcgaccagggccttgaccctcagccaccattagcccccactttggtctatagttctacagcaggagattccctgtgaatctcctgtctccattcattcactcattctcccattgattcacttattcattcattcaacaactacttactgagtgtttgtcatgtatgcaccaggctctgtgggtactgctgggcactgggcatacagctgaacaagacagaaacagcccctgctctgtagcccacactctcactcaagtgtggaagagacagacagtaaactccccacaagtcaggaaacaagatacttgcagattatgatgagcactagaaggaaaactgaacgaggccatttgacggaaactgaaggcaggggggacattagctagaaaggtcaaggaggttgagagaccttttgggaggtaacattggaactgaaacttgaatgctgaaatggagccagacaggagaatatctggggaaagcgtgctacaattagaaggaacagaagggccgggcgcgatggctcacacctgtaatcccagcactttgggaggccgaggcgggcggatcacctgaggtcaggagttcgagaccagcctggccaatacagtgaaaccccctctctaccaaaaaatacaaaattagctgggcatggtggcgggcacctgtaatcccagctgctcaggaggctgaggcaggataattggttgaacccgggaggcggaggttgcagtgagccgagatcatgccactgcactccagcctggcgacagagcaagactcagtctcaaaaaaaaaaagggcaacagaaaatgggaagaccttgaggctgtaccaattaggcctgtttgaggtacaaaagaaatgacagtggctgaaatcagagggaggagttgtaggaaacaagtcagagaggtaagcaggggtcagatctcaggaggactttgaattttaaaccagtggaggattttaaggagttaacatgatttgactcatgtttttaacaaaacactctggccagcctggtggctcatccctgtaatcccagcacttcggcagacccaggtgggcagattgcttgagcccagaagttccagacctgcatgggcaacatgacaaaaccatgtctgtacaaaaaacacaaaaattagatgggtgtggtggcttgtgtctgtagtctcacctactcaggaggccgaggtgggaggatcagttggggaggcagaagttgcagtgagcccagacagccgagatcaagttactgcattccagcctgggcaacagagcaagaccctgcctcaaaaaaaaaaaaaaagaaaaagaaaaagaaagaaacaggaaggaaggaatgaaagaaaaaaagaaagaaagagagaggaaggaaggaaggaaggagcactctggctgctgtgcgaaatgggaaggagatagaaacagaactttctggaaatagaccagtttgaaggctgatgctgtggtccaggcaaaaagtaatggcggctgggatgaagggcgaggtggtaaaaagccagtggattctggatatattatattttgaaggtggagtggacaggaccttctgatgagttgaatgaggggtgtaaaaacaataaggtttggctatgaatggggtttacagtcgtgaaaaagcgttgcggggagcgggaggaggaaacgaaggttctgctgggtttatgctactaccttgccgtgcttacaggagagccaagtggagatggatgcacgactccaacactcacttatctccgcaggttcttctgccccccgccctgtgtctacctctcggggcctggctggagggtgaagccagggcaggatcaaggtgagggcggaatcaagggctgccggccgcctgctctgtagggaggaccacgagattgggcccgagacggggcggttcgcaggcgcagtctccccgcgccctctggcggcgagcgctaagcttgcctggcacctgcgtcctcccgagtccttgcagagccagttcgcgtccctttccagctcaccaggcgggggaaacggggcccacggtctgcggttacatgggactggacagcgcgtccggcagcgccactgagacgcagaagctgaatttcgagcagcagccggactccagggtgagagcgcacgggaaggggtccgattcctgctcccatccctgcctctcctgggaaaggagggctcctttactcccctccgaaagccaagagataggtggggagaccgggaggccggggtcctgccttaaggccgagcctgagagcctggatggtggagcttctggtcacctccgacggggcggacgtccgatatctgggagaggttggttcatccgacgggggagggctgggatgagatggccctgtacctgtgagccccctaggaattcggctgcgccaagaccctgtacatctcagatgcagacaagaggaagcactttcggctggtgctgcggctggtgctgcgcgggggccgggagctgggtaccttccacagccgccttatcaaggtcatctcgaagccctcgcagaagaagcagtcgctgaaaaacaccgatcgtgagcagggcggggcctgacccccggcccgggcggggaggtgcaaccaagcccagaacggctaaactggggcgcggaggtgggggtaggctgggcttaggggtcagagtggaaaaggtggagtcggagccgagaggggaaggagtctggatgagtgggtgcggcccaggcctggggatgagaagagttggaggatgaaaagcagagaggaaagggacagataccaaattccaggttgggagttggggtcccagagcagacaaaagttgaactaggcaggagttgaactagggacagactaaaagtgacataggtggggcacggtggctcatgcctgtaatcccaacaatttgggaggccaaggtgggcggatcagttgatcccagaagttcaagactagctagggcaacatggcgaaatcttgtctgtaccaaaaaaaaaaaaaaaaaaagaaaaagaaaaattagcctggcatggtggcctgcacttgttgtcccagctacgtgggaggctgagatcagaagatcacttgaacccaagaggtcgaggctgcagtgagctgtgatagcaccacggcagtccagcctgggtgacagggtgagatgctatctcaaaaaaaaaaaaaaaaagttttacttttgtttgttgaactgaaagatgtccagacagcaaaggaacaggcaaaggttccaaagcaggactgcagcaggtcctggaaaaacagctgtgaactgggaatgcccagtgtatctaggcctgtgggcacattagccaggccggcacagggacagaagattggaaactgtctggaaagtccaaggaaccaagccaggacagggcactgatagcaccaactaaccttaaccctcaccctgaccccctccctcaccctaaccctcaccctaatcctaatccttaccctcaccctcactctaaccctcaccctaatcctaaccctcaccctcaccctaaccctcaccctaaccctaaccccaatcctaaccctaaccctatcccctcaccctaaccctgaccctcaccctcaccctaaccctgaccctcaccctcacagtgtgcatatcctccggctcaaaggtctccctcttcaaccgcctgcgctctcagacggtctccacacgctacctctctgtggaggatggggcctttgtggccagtgcacgacagtgggctgccttcacgctccacctgggtaatgacatctgcaggccctggagctgggcacttcacatgcattagcttatttaacctccaccacaactccttaaggaaggtaaactctgccccatgtgattaaggctcagaaacacaaaaagacttgactacagtcccagtgagctggtgactgttccaagctattctgactcccttatccatgccctttccccatatatcaactaagctgcctgcccccaacccctgcccccagggcagacatttgtgaggatggcctcaaatggcctctccagaattagaaccttcagttggctcccctgagtaccaagctttcccgcagggcccatgtgtgatgtgaggaagagccagaggcaacaaggcagggtttaaggcagaagcttgggggccgctgaaaaccttgtcccttgctttttttgtcccccagctgatgggcactctgcccaaggagacttcccaccgcgagagggctacgttcgctatggctccctggtgcagctcgtctgcacggtcaccggcatcacactacctcccatggtataggaagggagggcatgcctggaggggtcccctcagatccatgcagagaatgtggcacacacgggcagggctggagagtgaggccccaaggcatggagacacctgttctcacccagtgtcgcgtaggaccagacagaagtcaaagggcagggggaatctgctagtgcctgtgtggctattggagtagcagacagccggctaggagggcagcctctggacgcccgggctccttgccaccactgttcttaccatccttccattgcagatcatccgtaaagtagcaaaacagtgtgcgctccttgatgtggatgagcccatctcccagctgcacaagtgtgcattccagtttccaggcagtcccccaggagggggtggcacctacttatgccttgccacagagaaggtggtgcaatttcaggtaagaagcagagaataccagcaccaagtgtcctggaaagggagaatgcagagaaccacagaatgtaagatcatcaccctcaccatggttgctacttcctgagcagcctcccatggaacattaaaatcatagactcccaggacagaatcataggatgtagaaaaatagtaataagtaatagtatgaagcaatattccttcccaaagaattttagagtcataaaatattgggatatagccaggtgcggtggctcatgcctgtaatcccagcactttgcgaggctgaggtgggcagaacacctgaggtcaggagttcgagactagactggccaacatggtgaaatcccatctctactaaaaatacaaaaattagctgggcatggcagtgggcgcctgtaatctcagctactcaggaggctgaggcaggagaattgcttgaacctgagaggtggaggttgcagtgagccaggatcacaccattgcactccagcctgggtgacaagagcaagactccatctcaaaaaaagtaagtaaataaattgggatataaaattgtaggatgtaaataaaaatcatgataggtaatagagagcagagaattaatgagcaaagactattcgaagcacagataaagacacagaatgtggaaaattatagaatgtggaaaataataattatcgttaagcagtagtactcccaaaagaatattatcatagaatgttacgagatagaattataatatgtggaaaatagcaagtattattccttccccaagaatattccttcccaaagaatattaaaattgtagattattagagcatagaattgcacaatgttaaaaaaaaaaaaattctggaatcccaagaaaaaagacccttagaaatcagctatcccaggccgggccaatggctcatgcctgtagtcacaatactttgggaggctgaggcaggaggatcacgaggccaggagtttgagaccagcctggccaacatggtgaaaccctgtctctactaaaaatacaaaaaaattatttgggcgtggtggctggcacctgtaatcccagctacccgggcgcctgaggcaggagaatcatttgaacccgggaggcggaggttgcaatgagccaagatcaggccattgcactccagcctgggcgacagagcgagattcagtctcaaaaaaaaaaaaaggaagaaaggaaggaaggaaggaagaagagagaaagagagagagagaaagaaaaagaaagaaagaaagaaaagaaagagaaagaaaagaaaaagagaaagggaaagaaagaaaaggaaggaaggaaagaaagaaaaagaaagaaaggaaaaaagagagagaaagggaaagaaaaagaaaaggaaggaaggaaggaaaataaagaaaaaagaaagaagaaagaagaaagaagaaatcagctagctcaacaagctttcttaacgctaagtgagagaacttaagggcactgtccaagctgaggggacaagtgaaccccagagcctaggattagtatccagttcggtctaacgcagaagcccacgcgccatgctggctccctacactggtggccaccatgagaagcttcggcctcgtccccttgggtctcctcccaggcctctccctgccccaaggaggcgaacagggctctgcttaacgacagctcttgctggaccatcatcggcaccgagtcggtggaattttccttcagcaccagcctggcgtgtaccctggagccggtcactccggtgcctctcatcagcaccctagaggtgaagccgggcgctaggggcgttgggcagggggaccctgcctgcactgggcagtggtggtgctagtgagtggggggcagcgggttcccgccctacttggttctctcacctcacctggtcccaccctcccccagctgagcggcgggggcgacgtggccacgctggagctccacggagagaacttccacgcggggctcaaggtgtggtttggggacgtggaggcagaaaccatgtacaggtacggggtggtgaggcagcctctcttgggccccggggagcaggggaagggggtgcacgcgtcgtcggagtcgccgcagccctcaccctggtgctccacccccaggagcccgcggtccctggtgtgcgtggtgccggacgtggcggccttctgcagcgactggcgctggctgcgcgctcccatcacaatccccatgagcctggtgcgcgccgacgggctcttctaccctagtgccttctccttcacctacaccccggaatacagcgtgcggccgggtcaccccggcgtccccgagcccgccaccgacgccgacgcgctcctggagagcatccatcaggagttcacgcgcaccaacttccacctcttcatccagacttaggcgcgcccggtagccccggctgcccaccctggagggctgcgcccgcgccaggcgcggggacgtgtttctgggttctaggccctgcttccttgcccctttgctgcagaagggcagctgaaggctcaccctagaaaccgggcctggtgggtcttacccggctcactccctcccttgtccttacacatacaggaagacaagacctgagtggtgctgtctttgtgtccgtcgtgtatggctctccctgtcttcatttcttctcactctgtctctaaacctctctctctctcccttccccctcagtacttagtctacagacctatgtgcgtgtccctatccttctgtccttttctctcttcagctctccctgcctctcacacacaattttacatgccccgaggagccaagtttgggacatttaccctccaggcatctgtgtcccctcttgaagagaaaacacacagcttcacacatccaggcatagggggcaagctcttggggcatcaggaccctggagcaccaggtccttcctggaatattagatccacctggagcaccgggtctctctaagtctcacctggggaattcggtcccacctggggcaccagttcccacctagagcactgtgtcctgccctagagcacaaagacctgctcctcccgagactctctctgactgcagccaggcatagtacctttgcctgtgtttgctccctggtccacagatttggtggctgggcaggtgcctggacagtgatgaggtcttgccgccttaactgtcccccccagtcacttctcccacaggcccagcaggacgcagtcctgaggatcagggattctacagctgcattaaaatcaatcctatccaaggcagagtttggtctgtatgagccacctccccaagtgtgcctcccccaaccctcgcaccaacacacaaaagaggggacctgcacagaaagaaaagaaccacaagtctgatggagcagagagcctaccttttggacgttttctagaggaggaacagggtgcagaggcagctggcatcctgagtccctgtccctgccctggggttgttaccctactagctatctctccatcccaagcaagggtgcaccccaggcccagaggtgaccacgggaccctttcaaaacaaagctttcccaggatagccctgggcagaactcctgggattgactgggcagtaatgtagttgagaggggggcctctctgcatggggctgatggacagaatcacaatctattccccaccagcctacccaccctaggtaccactctacccagtctgtgctttatagggaaggaaaaaaaaaccaggcagaacactggcttgggctattggaatcaaggacacagataagtatcatgggtgccagctacctgcaccagcctctggtggtgcctgatgggaaaactggtctgaaatgtgggttctaggttctaaccctctggagaagagcttgccctcctaaggaagagctcatttcttgtaaaactcctcccccagggtatggaaagtcccatgagaaaaaagaaacgaacaatacgcagaggagaggaaatggggtatgttctttagccttcccaaagtcttgactaagttctgccatctgccatcagcaggctgcaacccactgtgaggggtgaggaagaagcctgtggcccctgaaggtgaatcttggctgaggaaggcagcaaatgagttgaatgggaaatgtccctgaaatgagcgcctgactcaccgtccatggtggtgttgaagcaggcagccaggagggaggaggctgagaagagtgtcatagcgcaccacatggggaattggggctcaagcgctcatcgtccagccctgcccccaaagtcttcctccaccactcctcaaggcaggagtcccagaagccaataatctaggttggaccaaaagcccagacccagccatacagctctgtcttagtcctcacccatctcaggggatcctataacctttggtgtccccaaggtatccatctggaagtctgtgaccaaagctccagccctggcctagcttctgagttccagctgctgaaactgtccttggaggtcttccttgcactgagtctgaagccatctaacatcaaactcctttccctctccacctgccttgcagcaccacctctagctccttcccccacaccacccagtcacccaggcctaaggatcccacccccacttccacactaccatatgcctcctgttttcctctccctccactactgccctgccaggtcctgtgtcgcctcttccaaaatttcccaaactactctaggtagaactagctatataatttgtgggccccagtgcaaaatggcccgttgttcaaaaattattcaagaatttcaattcgactgaacacgggattaaaaaaaaaaaaagaacttcaagacagccacaggaaatgatgaaaccaagtgcaggggccttccaagcacaggctgcacaaccacgaagccagccctggccccaggcttttttcttgtattcccacagaccctcaatgggaccatatcgactgcctgctttggatcaaaggttttacctacatgcccattgtctcctctaggctgccatcttcatggggaaaggagctcttatctctgcatgtcctaaagggtgcatcacaatgcctcgcatgttgagttggtgctcaataaacagtgaattgcattatatggcattggcagatatttagatattgctaatgcaaagtgaaaccggcaggtggcactgttctccacccgagcattaagttctcattttatttatatttaaaaaccgggccttaatcccagccctttggtaggccgaggcgcaaggatcacttaagcccaggagttcgagaccaccctgggcaacataacaagaccccctcccccatctctacaaaaaaatgtaaaaatagggccgggcgcagtggctcacgcctgtaatcccagcactttgggaggccgaggcgggcggatcacgaggtcaggagataagagaccaacctggctaacccggtgaaaccccgtct[133 bp omitted]cactccagcctgggggacagagtgagactccgtctcaaaaaaataaaaaaataataataataattagccggtgtggtggtgcacgcctgtagtcccagctatggggtgggggcggggggatgctgaggagggaggatcactggagcacaggtagtggaagctgcagtgagctgtgattgtgccactacactccagcctgggtgacagagggagaccctttgggggtttatgcacagaattctacatacttccagggaatttcctaacactaaaacccatttatggattaatttagtcctctttatattagaatcatttgccacgctataaaaattaatataccgggccgggcgcagtggctcacgcctgtaatcccagcactttgggaggtcgaggtgggtggatcacctgaggtcaggagtttgagaccagcctggccaacatggtgaaaccctgtctctactaaaaattcaaaacattagccaggcgtggtggcgtgtgcctgtaatcccagctactcaggaggctgaggcaggagaattgcttgaacccaggaggcagaggctgcagcgaactgagatcacgccactgcactccagcctagggtctctccagcagagtgaaactccgtctcaaaaaaaaaaataatactaataatataccggccacgccatggaacaattctattaacatctctgagtgtggagctcaggcatctgtattgtttgaaaccctcccatgtgaatctagtgagcagccagggttaagaatcatggccctagtcagtatttcctcctcattttatagatggggaaactgaggctccaagagaggaggctaaggtcacagcagatggcaaagcctacaattgattcaaatcctgcactcctaccactaaatctggggctctgagtttctcttcattctcattctaccacgctgctgtgtgtaggtgacatgtgtgttgcagagggtggggatggggcatgtagtgaggataaggcccaaatctccaatttaccagctctcatgctgcctggtgttccaccattattaacaagctagttccccagtaagtaccgaccttggggtttctctctctttctttctttcttttttttttttaacttctattaagttataaccacagcataggtaaaattctctgacagcttccccctgggtagggcacagacctgtgaagatggcaagggaaagaggaagtggttttaagggaagtgaaacccataatacatctataaggttgtggccaggcatggtggctcacacttgtaatcctagcactttgggaggccgagccaggcagatcacttcagatcacttgaggtcaggagttccagaccagcctggccaacatggtaaaaccccgtctctactaaaaatacaaaaataggctgggcacggtggctcacacctgtaatcccagctacttgggagactgggacagaagaatcgcttgaacccaggaggcgaaagttgcagtgagctgagatcacgccactgcactccagcttgggtgacaacaagactctgtctcaaaaaataaaaaatacaaaatgtagccagacgtggtggcgtgcacctgtagtcccagctacttgggtggctgaggcacaagaatcgcttgcacctaggaggcagaggttgcagtgagccgagattgtgccactgcactccagcctgggcaacagagcgagactgtctaaaaaaagaaaaacaaacaaacaaaaccatctataaggttttgccacagaccagctcagaacagcctcctagacaggcttggccctgttccagaccctaagggacaaaggcaggcagggtagcagtggcacaataatgcatttagagggcaaagtgataaacccccactacagctggctgcttgccaccagatgggcactttcacctttgctatctaatgtaaactaatcataaaccttgtggcatcccatcatatttacaggtcctcaaggagagagaattatacaggttgtatatatagggcagaaatcttgcaggccatcttagaattctgtctactccccaaacaacatagcaaatcataagtaggggagatgtgtttcacttgtaggccttcccacaccccatgcaggcattgtcccatggttttgctacctctgaagattggcaagatcatgaacaaaaagtgggcccatgcctggcttctgtaatgtagtggttatcacattcgcctcacacatgaaaggtcaccagtttgagaccgggccaaaacacgagattttccccctaaatttagtgagtttaatcgaggttggaaacaaacagaaaactagttaaacctgtgcctacattttggccgggtgtggtggctcatgcctgtaatcccaacactttgggaggccgaggtgggcggatcgcatgagatcaggagtttgagaccagcctggacaacatggtgaaaccctgtctctactaaaaatacaaaaattagccaggcattgtggcacatgcctgtaatctcagctacttgggaggctgaggcaggagaatcacttgaacctgggaggcagagatagcagtgagctgagatcataccatggcactccagcctgggcgacagagtgagactccacctcaaaaaattaaaaaacaaaaagtggaccaatagtgtccaaaatccattttgcatccactgcccaattctcagaaatattatatattatcagaaataaccagagttggctctccagacagataaagccctagtcgaggttgaccactgatggggctatgtctgccagcatttaggatggcttccaatgagtcttgtatccaggtgctcctgcccctgggtggtctcctgtcacaatgaatagggctgacccatgtgacccatgcaatattatggaagagatagtgggtgacttccaagctaagtcataaaagtcactgtagcttccacttggtggctctcttggatcgcttgttctgagagaaaccagctgccgcatcacgaggactgtcaatcagctctatgtgggtccacgcaatgaggaactgaggcctcctgccaaaatagccagcaccaagttgtcagaaatgtaactgagccatcttggaagtggatcctccagcccagtcaagctttcagatgacagcaagacctggccaacgtcgactgcaacctcacaagatggagccagaatcgcccagctaatgctcctgacttctgactcacagaaacaatgtgagataatatttatgttgttataagcccctaagtttgggggtaattttaaatatcaatagataatatgggggtcttctttttttttttttctttttgagatggagtctcgctctgtcgcccaggttggagtgcagtggcacgatctcggctcactgcaagctccgcctccccgcttcacgccattctcctgcctcagcctcccgagtagctgggactacagacacccgccgccacgcccggctaattttttttgtacttttagtagagatggagtttcaccgtgttagccaggatcgtctcaatctcctgggggggtcttcttaaactaatactttacccaaaaagatggcactgatgatgagaacaccatatattgagcacttattgtgtgctaagctctgacttgcctccctataggctgttggatcacaaggtaacagctggtaaaagctgaaacccaaacccagaggtcctgactcagtctcacaccatccaaagcagccctaacaggaatttctacaactggaaatgttctgtgtctgcaccacctgatacagtagccactagccacatgtggctgttgagcacttaaaacaaggctagtgcaactaagaagcagaatttttatttttacaattataattaatttaaatttataatatagccacagttcccagtggctaccatagtggtcagcacagatctaacagatgtgagggccttctacaagacacaagttaggagaacagagacccactcaacctcatgggactcagaaaaacagtgtggcaaagtctcaggagagatttaagctgccacgagatttaagaccagaatcactggttcagagggggtttgcaggggcatgaacagcccccagtgagggagccttgggtgatataaaccccttgataggcagtgcagttgttagcactctagagcccgactgccggggttcaaatctcacctctacaactggtaagctgtgtagctttgagcaaggtatttaacctcttagatgcagtttccctatctgtcaaatggggttactaatagcacctactctgtggagatctgacaattaaatgggatctggtataaagccctaagaatgggttcctggccacatggtgtgtatgggagggtttgctccaactaccaccaattcctgtttgcgtcctttccccaaccccagcaaagtactgggcaacatggtgccaaaggaagatcaccaatgtccaaggacctgaaattaaggttcgactctccagacacactaggggcaggttgccctcttggtaacaaggatcttacccacctcacagggttgttatagtggtcaagaaagatggcccatgctatttccggagactgccagccagcctggctgcagcagtggcctgagtgaagcaggcggagacagtggtgcggagagcccacatctagatgggtgcctgccgctcagcagctctcttgttgccatgcaggctgacagttgccaattttttttatttctttttcccaagaaaagtgagaaatctggatttttatgagaaacctcctgatttctatggatggcaactgacgcaaagatttttgtgtttgctatttaaacacagtgccacctaaacaaaaccttgaagtaggggtgatatgctgcataggccatcagggtgcatgttctgaagtcttccctcttctctaggccccttcctgccttcttacctctctgcccccaccctctgcccacccccggcatgtctggcaccccgtaggggatttggtccggggagtttcttcatgctccactgagatcaaggggatacagagcccaaaaaggatgacttgttatgaacgaaaatgacagaggcaagcagtttagaaagtaccaggttttattatctttttatcaaaaaaaatcagtaacagacaacagtgtgagaggtgcctacagaggaggtgctcactccaacacagcccaaggggaagggcactgggggcagaagaggacccagccagctgggaccctgggttgcagtggtgacgggagctaatggccactggtgcagcaagggagggtggttcccctcaccgcagccactggggtcaggaggagacacgacctgcccaggctaagccaccaggcctcccctctcaggagagggagggtcccagacaacaggccccagctggggcctcatcagccctcccccattcccccccccctacccagggagacaagggtcgtcccagcacagctgaggctgtgactcgttaagccagtttagttctctagaatagtgctgtccaacagatggacatgctctcgctgtcagtacagtagccatgaactacatacagtgacgcctctagaaacgtggttagtgcaactgaggaaggaatttttaatcttatgtgattttaattggcttaactttaaacagccgcatgtggttactgtattggatagcacagccctagagcctgaagaaagcaaaccaaagaacaccagctgggtcccaaacagaaggcagaaagggtagaaccatccacctcaactattccagccccatcagaaggcaccaggaacagggcaagagaaaaaggcaaaaacccacccagccacatgaaaattcactcactcaaccacccagcaacatcaaactggaaacaccacactatttcctgaaaaaaatatatttatctatttttctagaaccaaggaagaataataatatattataagaacacagacacaaatatcccaccatccccttcattatattttgggatctgctaaaaaaaaactatgtttcggcaaaagctattttataagaggaagcagcttcagaaagggccaaggccatgaggagcggggtttaaagtataaaaaaaaaactggggaaggggtttaatgaaagagaacaaagaaagaagaggggaagggaggccctatctaaagctataaatagtaaaaaaaaaaaaaaaaaaaaaaaattaataaaaatcatctctccggctcttctctcattttcaagaaacaaacaaaaacaaaaacaaaaaccattaaatacaaacttagcaggtgctgtggaaatgtgcgagagaatgaagacacctcggcacctccacactcttgcccaggcagagatatacactctgcacaaaggaatgaacagttaaaaaaacgaacaaacactaaaaatagatttacaaatattctataaatccatttcagcataaactctcagctcttttccccatcctcccccccaaataaaaaaggttgatttccaaaagtcacttgaaagagcctagaatggccccaggtatataccacagagattcccgtagtgtgatcacaagtacccatttacagaaacatctcaaggtgcaggtggttctagttccttcccccatttcctggcagagagaccggctgtgaaaggaagggaggaaggccactgggggaggacctccagccaggactccacacaacatccgttagccccctggcttcagaggagctctggatgaggcatggtcagtatgggcttgagggcggacctagattcttaactggaagtttaagaagtgatccaatcccagtcttgccttcagaaaggccaagttgaatccatttttctgccagggcaactgaggcccaaagctcaagaagaacctggcagaacagtagaagacaatgtctcttctgaacacttcaaaggtaatcagagctggagatactgacaagtcagtattaggttgacctcaccctaccctaatgtccacccttcaaaatcccctggcttccctccccgctaaagtccaagccagtgcccacaagcaagcttcacgcgtagaactcattggtgggggctttcttgtagatgggtttcttgcccaggtcatagctgccttcatccttcttcttcatacggtacatgagcagtaggatcaggaagacggcaaagaggatgcccacgatgccacccacaatcagagctggagaggaggagagagaagaggcgggggtgagagctcctcatcaggacctaaggatgaacccctctttcccccactgtcagttctcttacaaccagacatcctcaccatcaccactgcctgtgccaggcaagctgatgccttatttaagttgacctcatgaccccagttataagaagtgggtcgttggcattttaagtcactgaagaccacagggctagtggtaaggccactcctttttctttttgagacgaagtctcactctgttgcccgagctgagtgcagtggcgtgatctcggcttactgcaacctccacctcccaggttcaagcaattctcctgcctcagcctcctgagtagctgggattataggcacgtgccaccatgcccggctaatttttgtatttttagtagagatagggtttcactatgttggccaggctggtcttgaactcctgaccttgcccatctcggcctcccaaagtgctgggattacaggcgtgagccaccgcactcggccaaggccactattttaacccacatctgcctgaatctaaagcctaggctctttccaaacaccacgcggactcccctgcaacagtctagcactaactgaaccaggaacaggagaaaaccgtaggctatggaaatccctgtagacatatttatcctgcagtccttagcacagggcactctctagctctccctgtgtgcatatttacctatatagcctacacttcatagacaggtatgtacattcaaagtgcacacatgcagaacatactaattccaaactcttatgttacaattacatacagaactcagtagctaaggcctggtttccactcctacctctcctacttcctggctgtgtgatttggggcaagtttccttcatctccctaccgcaaaatgggaagagccatacctttctcatacatttgtcctaaggattaaataaattaatccactcaaagtgcttagaacaatgcctagtgcatagcatattctcaagattcattaactgtaagggtttaaggtttatatctgtgtcccgaaccccctgaatcaggtgtgcacaacaggaggtgcttaataaatgatactttcaggctccgagaggagaacctgcctagtgttgggcagagatgggcttctaacagtgagtgggtctggcctgtccactctgccaggtggcctgaatgactcattcctgtttgctaggggcagggatgcttcatagaatcccttctgtggcagattgagttccctaattcggtcttactcgggctaagaagattaattttccatccctgcacacactacaaatctatgtacacaatggggacagagtggcacagaggagtcaagcaaggttctttcttgggtaaaatcctatgaaaaagcaacaaaaaagtacccccaggaggtgccagagcaagcacatggaatatcaggcatcaaccccattcttgtctctatcacctttccctctgatgaccccagttcctccacgaggccctgggtctgcgctgggatgccccacagggtcaagtttcaagcacaggctcagaagctgactgtggtcctcagtccaaatgccaggtctgccacttccagctttgtgacttcggataagttctttagactgagttttgtgttgtacggactcaatcaggggcacaggaatcatacagcatacagcaagcatttaataaggctcctgggtgctgattaaagcttctggaatgggggattccaccacaccagctaacaatataacttttcacatgaggctcttaggcttgtataattctcaaatggaagattaaagagataacctggcttcagttcttttcttactatgtggcctaaagcctgggcctcagtctccccatgtataagaagcaggtgcttagattaatcagtggttttcaaatttttctttagaagcaatagcacctttagttaattagagcaaaaccttatgcaaatccaaagtcttatgcaaatctttttacttctgaaagaaaagtaaaaagaactttggctcagataccaggaagccagggtcagggctgaggtgggcccagtcatcaggggctgtgctcccaggaaccctctttacaagaggcaggtgagaccttccatctgtcctggatgaagccaggctctgtccctatagctcaagcctccttggagctgctggctctgttgattcccaggagacaggagttacccagcatgggcccagggtgcccacttgccaggccggttcatccaggctggccctcggccatgaccttggggagttccctccatcccttttgtcaacacctgggacaaagcattcctcaccgcacattccagtaaagaactctcaactgaggccaaatcggaatagccctttatagtgtgcaaagttatttcatattttatttttcatggactcattatatcaaccccagaaggtatcactgtacccattttacagataaggaaactgaggctcatcaagttcgaaagcttctcagccaaggtcacaaggctgccaagtgatagagtagggggaggggaagctaacccaattcgaaggagcctccagacttacaagggaaattaacttttaatgattaactcccagatgccaaacttatacagtgaaagtcctttgcaaaataaatgagaaagacttaaggcagaagaatgactcaatgcctattttccagaagactttgataggtgctttttcctctccctccaccaggctgcacagtcagagccaccccataaggaaggtgtagtctttcaatgttctagggcaacctgaataggcaaaaggaaggggcaccaaggagcctcatggctggaggcatccctgcctgcaggtgctctcccccgctgagccccattccaccttcaaggcatcttataagcagcatggggacttacctgccaggacctccgttctctcaaagatgttgctgccctgcacagtgctggacattgacaccttgttggacacatcctcactctcttcaacgggtgagattctcttggggataacctcattctcctctagtttcttgggttcggtggggacttggctcccagaccctgccctctcagggatatggttatctagaggcacctggatgggcggaaaggagaagagacactcagcgtattttggaagagactcagggcaggggacagggacattcagccaggcagagaatctggttctgccatattcagctgaaccatatggtcctggagcaggaattggcaacactgtctccacaattatgctgccaaaatccttatccccaacttttttagtatatctgtcccaaatgaaaaatgaatgcacccaagggaacagggaagcaggtgctctcctgcactgctggccactggttattctagagcaaccactctggaagcaatttggcaaaaccttagacatcgcttgccctttaaggtggcagttttgccctggaaactctattgtaaggagctcttcagagactacgtgtaaaagatgcttgctgcagctcctctgcctatgaagtagccattcttttattcctttactgtcttaataaacttgctttcactttactctatggactcaccctgaattctaccttgtgcaagatccaagaaccctctcccttggggtctggatcgggacccctttctggtaacatctttctggagaaccacagaagggatgagacggaggagactcccgaatcaaaggaaatggactgcagcactgattggaggactttggatatcaccttttgtcagaactaagagttatgaatggccctcaccatactggccctttctgactgaacccctctctaccatggatacaagaggccctaatagttaagcaggaatatcatcaccctattcagcatgaagaagttatagaagatggatctttgtccctctgcaacccttaggattaagggttttcttacaaaagggagggggaaaatgtcaggtgtttgaaccagagtgcctacatcttgaataggggctgggtaaaataaggctgagacctgctgggccgcattcccagtaagttaagcatcctacgtaacagaatgagataggaggtctgcacaagatacaggtcataaagaccttgctgataaaacaggttgcaataaagaagcttgccaaaaaccaccaaaaacaggatggcaatgaaactgttggtctcactgctcattatatgctaattatactacattagcatgctaagagacactcccatcagtgccatggcaatttacaaatgccctggcaaagtcaggaagttactctatatggtctaaaaaggggaggagcccctagttctgggaattgcccacccctttgttggaaaactcatgaataatctaccccttgcttaacatataatcaagaaataaccataaaaatgggcaaccagcagccaatgccactgctctacctatggagtagccattcttttattcctttactttcttaataaacttgttattgctttgcaaaaataaaaaagatgtttgctgcagtgttataattttaaaatgttaacaaattataagccatttttccgtcaataaagggaatcaggtaaactattacgcagcctataaaaatgacaagagcattaaattatgcagggaaatactcatgaccagtctaagtgaaaaacgcagttcatagaattatatatatatactttttttttttttttttgagagggagtctctgtcgcccaggctggggtgcaatggtgcaatctctgcccactgcaatctctgcctctcaggttcaagcgatcctcctacctcagcctcccaatcaagtagctgggactacaggcgcacgccactgtgccaggctaattttttgtatttttagtagagatagggtttcaccatgttggccaggctggtctcgaactcctgacctcaggtgatctgcccgtcttagcctcccaaagtgctgggattacaggcattagccactgtgcccggcctatatatatacttttctatcaatgctaggaaatagctataaatgtagagaaaaggagttggtgttgacggtgactatccctgcagggaggatggcctaccagcaacctacaaaatgagcctggggccagatttgtttgtttgtttgtttgttttaacacagtctggctctgtcacccaggctggagtgcactggcacaatcttggctcactgcaacctctgcctcctggacttaagccattctcccacctcagcctctcaagtagctgggactacaggcacatgccaccacacctggctaatttttgtattttatgtagagacaggtttcatcgtgttgcccaggctggtcttgaactcctgacctcaagcctcccaaagtgctgggattacaggcctgagccaccatgcccaccccagggccagatttttaaaaagccttcccgcatagtggggtaagacccctcacttattctgcctatgggggctgtattttctgcctctcccaataggtctgctatagaggagcaaagtggaagaggcagaagcatgtagctacttaccaagggatggacaacttcagggccgatcatggagtcttccaagtcatctgtaaggtcagaatagctgtgtgagtgaggtccattaccccaggaaaatgaccccttcagccaggactggtgggagctccaccttacaaccagcttccaaatgctcaatgtccagcaagcgagcttccccacccctacttcagtcatctcatctgtaaaatggggctcctcagacccaccccctggctctttcacaggaatgtgtgagctggcagctgggcagaggcttcatcagctctaaacccttgctctgcaaagtgtggatccaaaaaccaatagcaacacctgagagctggttagaaatgtagaatttcaaggccaggcgcggtggctcacgcctgtaatcccagcattttgggaggccaaggcgggcagatcacttgaggtcaggagatcgagaccagcctggccaacatagtgaa[140 bp omitted]cactccagcctgggcgacagaacaagactccgtctcaaaaaaataaataaataaattccctccatacgtattcctaaatacatttttcccaataatgggctcgtaacaatatatcattaacatctttccattacaatgcttaaagagttacattattattttaattacttctattcaatgaatttcatttattttcaatagtctcttactgttgaatgtttaaaatgttcttatctaaaaatattgtcatgatcagaaaacattaaagctaatatttcacttatttaaaaagagtaaaaataattcattggttaaaaaaaaaagaagaagaaatgtagaatttcagggctgactgaatcaaaatctacttttttttttttgagacagagtctctctctgtcgcctgggctggagtaccgtggtgccatctcggctcactgcaacctctgcctcctgggttcaagcgattctcctgcctcagccccccgagtagctgggactacaggggtgcaccatgacacccagctgatttttgtatttttagtagagacggggtttcaccatgttggttggccaggatggtctcgatctcttgaccttgtgatccgcctgccttggcctcccacagtgcttcaattacaggtgtaagccaccgcgcccggccaaaatctacattttaacaagatccccagggaattaacttttgagaaagaaaactctaactgcaatattaaaacatttcctgggcgactatgtgagatgatggatatattacttaactccactgtagtaacatttttactatctatatgtatcccataatatcatgttgtatgcacataatgaaatttatttttttatttttattttttttcaagacagagtcttgctctgtcaccaggctggagt[141 bp omitted]ttcaccatgttggccaggctggtctcaaactcctgacctcgtgatctgcctgccttggcctcccaaagtgctgggattacaggcatgagccaccgtgcccggccataaaatttattttttttttaaaccaaacacacacgtactgagtgcttggtaggtgccaaaagctttaagtcagttcagtccccacaacactgatgtactatctttattattcccattttacagattagaaaactgaagctcagttcacacaggatggaggcttgaactcaggaccatgtgactccaaagctaaaacttgcaaagctaaaacttgcaatcattaacacctctctgcacataggagggacacttattagctgtctggcctagaggccttgggcccttcacccgcccccacccccactgaagcagggacttgttcttggtttcccaactacatctctgcccactcatgccccctcccaccccatccccacttctaagctgctacttttccttttttgttttgagacagggtctcactctgtcacccaggctggagtgcagtagcatgatcttggctcactgcagccccaacctcctaggctcaagggatcgtcccacctcagcctcccaagtagctgggactcctacaggtgcatgccaccacatccagctaatttttgtgtttttgtagagacaagttctcaccatgtggcccaggctggaacttttcctttcaaaaaaaggaaaacactctatgggtcctccttccccactcccaccctgtcctgccacccatcctaccctcaccccacccccaccatgccctgcagaaaagagaagagcttatgaggacacgttcaggctggagctcagaaaacccagagctaccaatgacttcaaagcagcaaacagcttgtccccaggggctctcagggatggaataggttaatccattacttttgtttcccctttttttgagaaggaagaagggcactctaggaaaagtcccacaaaaatccaagtctcaaggcatggtcaccctcctggctggtgaagccaccactccctccagctttgtgcctacgcctgcccagcacaccttccgtacccagatctccagagccagacagctcaaagtcatcagattcctgcccgggccccactacatcctcatcgtctggtagggctccggagaagtatcggccttctaggaggtcctgggggtcgatgacctcagtctctcggatctaagataaagaaaggagacacatcagccaacatccccagtgctccatgacagctgatgcccaaaagctagtgaagtgggcattcagaaactagaaagagaccaggccagggcctggagacctgcgtcctggatcccactctacctctaactcaccgcgtgtccttaggcaagtctctttccattctgggcaaataaaaatagtacatgaggctgggcacagtggctcacacctgtaatcccaacactttgggaggcggaggcaggcagatcacttgaggtcaggagttcaagaccagcctggccaacatggtgaaaccccgtctctactaaaaatacaaaaatcagctgggcgtggtggcttacgcctgtagtcccagctactcgggaggctgagacaggagaattgcttgaacccgggaggcggaggttgcaataagccaggatcacgccgttgcactctagcctgagctacagagtgggacccccgtctcaaaaaaaataaaaacagtaaatgaggtaataatcaaattattaatatggctagatatcctttaccgagcacttgctatgtgctgggccctgttttaataactctggaggcatgttattcacttctttttacagccgagggagtcattttcttttggtgacacagctggcagatggaagagcgaggattgcatacgcagggctgcctgacttcagagccaggagtctccatgcacagggccctgggatgctacactccagggctctgtgatgcagtggcagctgattcacacaggacagggagtgggctcctggttctggtcttgcccagtccaggatacttttcccagctgagtcagtctgggccgggacagacagggctgcctcacgcacaccctaagacagcctcaggtcagggcgctgcccagacctgatgactcaggagtgtactcctggattcagtcttgccttccaaacatctcccacagatctactctgctgccagcaccatgcagacaccgagaggcacaatccctaccctcacagaccatccactccagtacccataatcatcactcagccactaccctgtggagacacagctgatcaggacagagtctcaggtccactcccaccaaaccgcttgccaaaagaaagtgtcaaaggtcccgggcagccctacagtacatcagttaccctgctcccatcctgtagctccaccgagtgggaacaatgtaccctcaagagcacaggaaacatttggatgcccatcacccttcctccagcttctgggctcaggcttctgtttgcccagagaacagcagctctgagcaaagttcattattctactaattaattcaaacactaaagtgcctagtatttgccaggagagttggggtttttcattaagttcaatacaccatgcccctcccgctgaaagacattcccatcttctccagacgccataactgcaggagctgggggtctgcttagaatcacagaatgccaggacccaaggagctcctgtcctcccgtttcacacaacttgaatctgagcccggaacagggcagggacttgcccaaggtcacacagagcgttcgctacataactcaggatagaaagaggtcaggtctctgtttcggacaccccaggcagtccttcactcagctgagactgccattgacaaaggagggtgtctgagaaggaacatctgtccctaagataaggttattatcattgcaggagaggcccaggaaagctgcttcagagccactcctgtactctccccactgggcttctggggagaggcaggtggaacctgaccctcatgcaccctcttccacccccacagagggagaatgctggattcccggaagggagcggggtcaggccacaaggaaggcagtggccaggaatcactctctcccggggagtggggagaatgctgaacgcttggcacccgtgggggtggaaagccagagaggttaagtgctgctcagagatgacttcatgactcgggaatcaggagctgccgggctgctggtgctggaattcaagcccccgcacatagcccgtgcctgtggctttggtttggcagagcaggaggaaggctcctcatggctgcccaagtgcctatacctaagggcagggtccctgtgctcctacctccatctcctgtggcaaatcccccaagaacccaagtgacaggccttaaccaagcacacagcctgtctaggtccttttaatagtccctttttgcagagatggaaacaagggctcagaaaagtaaagtcacttgtccaaggccacacaagcaggaagtagccacactgggccagaacccaggcttcactgacctggacatttaaccacaaacacataaacacacgcatgaacacatatgtacacggggtcaccagcctgccccaggctccaagggagccctgttaagtaggggggtcaatctagccgggagaaagaaagaatggtacactttggccagctgttgaccaggtcaaagtcctcaacaggggctgtagttccatcaggagacttgtctcaggctgagagaccttttcccacccctcactgcccccaggagccatggaaggttgtttatgcatccagcctctctttcagtatgtgaaagtgctaagaggtatttcaaaacaacccatgggattagcatgcccactggctgttaggaattacctccgttttacattagagaaatgaaggctatgagcgaaagtggggcgtgaagatcttgcagccaagtcagcagcaaaaccaaggctgaaaccaagatttattcccagttcagccctctttgtgggcacctgttcatccttaacccttcatttttatactcagtttccaaaaaagaaactagtctagtctgaagtcaccccggggctccgcggcacggcctggattcgatcctatttcaaagctctgaaaagatggagtcttcaaaggctgcatttagatgagcccaggatttccctcctacagcaagtcaaggggctgggaagaaacttcttccagctcccagtggtgataggaggacacagggaattaaatctctccttgagctctggaagccccctctctgccctgttttggtcccttctccacccatgacctctgacaagagggaaggcaactccaaagtggataagagccatttaggactaggccagcaagacgggaccaagccccgtgggattgtgggcaatcactcttttttgtgtaaaggttgggaaggcaccaacggtcctcctctcctccgccctcttttcagataaagcccattgagtctggggtgactttgaagaaccaggccacccagcagccaggcccagccctgaccagagatggaccccgccctgctcctggctaagaatgtggtctgttctcctcagctcaccccacctttgcccaggcatgtgtgttcgtgtgtatacatgcacaggcaccctctctgggctctcaagtctccttgtatctttgtccctttcatgaacacacaacagaaattaccaactaagtaagacagtggtggctaggcacagtggcttaatcccaacattttgggaggccaaggtgggaggctcacttgagcccaagagtttgagatcagcctgggcaacatggtgaaaccccatctctacaaaaattagccaaatgtggttgtgcacgcctgtggtcccagctactcgggaggctgaagtgggaggatcacttgagcccaggaggtcgaggttgcagtgagctacgatcgtgccactgcactccagcctgggtgacagaggaagaccctgtctccaaaaaataaaaaatagggcaatgggcctaggtcccacagactctgctggccctgtggctggtggggatctgggattagtgcctgggggtttagagatactacattcttccccagactgttggggagaaagaagggaggggaagtgctcttttgttctacagaaactaacacctgccaacagaaggtatctgattttataacctagcaaacagacaagacaagggattttgccaaggtcatccaagcagctggcagcggagatggacttagaacctaggtatcctggctcccagactggaattatcttctctccccttccagggtgttggctgcccctaagggtctcagcaaatccacaggcagcagctgtcattacagttatactccccatctagtcttttggctataggcatgaagctacgaaaaggtcctatcccaaccctatccccaaatcctatggcttctatcaccccaggaaaagcatgagtgactaaaaggagtatccactacatgccaagcaccatgctgggtactttgtttatacaagttcatttaaatggcaaaacagccttgcaaggtgctctacccattttgcagatgagaagactgaggttcagctgagtcacttatccaacgtcatgcaactagaaagctagagctgggattcaaatccagatcttcctcaagaacacgtcccaaccacaactaggcttctcactgccacccactcttcacttctctccagcctaacccgccagtccacaacacactggctgggccagggctccagggcaaccctgtccctgcctaggagtaaacaaaggtgaaagtgatatcacttaaacaaaggaacagaaacttggctggggcaccagagaggagttcagggtcagggcttggataactgtgaactaatgagagcctctcccgacctggctcctccccaggggaggtagggtcggggacacacttgacccttctttcaggaggcaagaccagaagggtaataactgggcaagccaaatttagtggggagaggggatggtgagtacctggggctccaacacctggacccaccagaatgatttctagcaggagacccccagcagcgtacactactcgtaactgttcttccccaccccacccacttcttaagggccagacattccccagaatggctaaaacctggggcccacaactgtgactctaccacccagagtggttgtgcatcaaggcagattcacaagtgtgagttctgccacttcctaactatatgagcttgggagtttatttcatctctgaaatcctcagtttcctcttttgtgactagggctggtagcaccttgcagggtgatgaggattaagaggaatgcatttgtgtgtgcaagggacccagcacgtgatcaatgaatagtggctgtgattaacccctacctgccttcctcctggccagtgggatcagtgctcaaaggatcagaggcctgggaaaacttgcagaggcagttctgttgctggaaggaagctagcctggggacagggagatggtgctttgcaaactgtaaaggaatataatctataataggttatcattttgcttctgagcccagagacttttcaacaaccaatcaggtcccttcagactgtgaaaaaaagatacagagatagtcagagacctgcccaaggtcacacagctttgaccacctgtcctaagcagacagaggtaaagaccatttttattttccccgaaggtgcaaatgacagtgaccagaaacacctgaaattctacttggggacctgggtccccagggacaaaataaataaataaaaatctagaaggtaaaaagaaactacacaccaatccatggtctggtgctctggtgcctgaatggttaaaccaggtctgggggtgggggtggagtgagggttcaaatgtcgccttcaaggtcgggttactctgaacacaatcactcaggagagagccaggcctggcactgcctgcaaccagcttttcaccaagcctcagggcagcccattcccacagcaagaactccaggatcctagggtgccagctagaaatgggggaagggttcaggagcctctggatgtctccctgccaggagctgacccagcacccttgttactaactccctggatgatcgtggacaattcccttctctgagcctcagttttccaatctgtaaaagacaggtctcaaagagacaagcctccctctgtcccagcccagtaaccaagctgggcattgctccgattaccggtggagacagccaggagggggctggctccctcagggcctcagagacagaggtgcattgaagttggagcttgtaatctaggcagcagatccgaaatccctgctggatccgagggctagggaggctctcgggatgtaaacaaacctcctgtgttctcagagcagagtagagagcccacgctgcagccttatctcagctgattagatcagccctgggtgctggcttcctgcctcttcccagcctccctcaccgacccccaaggaagccatcctccagaccaggtcagtctgtcccacagacggctccggcagggcttctccaaggcaaggagtatccccactctgggtagccgggccagccatgtgccacatctgcccccacgcccagaggctagagtgacaccgccagtccccgcaggcctggccactgactgctgggcttcaccaagtcactgtttccacacataccagcctctccctgcctcccctttccattaccccaggtgtcacctgaccagcagcctcttctactgtgccagagaaaactggagcagccgagctcccgggcctggaggacagggggaggggtgagatgcagcctgaaggggtgggggccgctgaataggaaggtctgggctgaaggtgggggttgggggaagcaggaggcaagaacaaggctgggaagtgggggagggaggaaggatggctgtagaaaggtcaaagccagaaagaactgctgagatcagagtgaccttttggggagtactgcagccccctgaaaaggataaaaaggtctaaaccccaataactgtaactcttagtttacattttcaacatatgcacagacaccacctccccaaagccaaactctggccgggttaagaaccctcgtctaggtgctaataaagccagaactttacaagtttgccaaacagcgatgatgacctttgagtgccacaggtgttttatagaggacactggagttcacatcaacaaagtgacgtattaactgtgtgtgtccctgggtgagcagcagagctaggacgggggctggagttttctgtaccctctttttcagtcacccagccttcagcagatgggaccagagaggccccagtgagatgcaagaatgtgcccaaggtcaccactgtgttagttaatgacaaacaagcccaagaagtcaggcttattcttctaaggttaaatgagaccccaactgttgacatatgtgttctctctcctccctctctagggcaccatgcagtgaaaacatacgagaaactggcttttcagaacactgtaccttttctgtccaccaacaccccacccctcaaagtgctatttgcaatcactcagcctccttaagggtagaaactctgcccctccagcacaggagggtgaccccaggtcctggacagtgtccagagtggtctgatacccttggcaaaccccctgccccctctccctccaggctgcaaactgttcagcatgaggctccagcaaatcccagcaggagaggtggggctgcccagaactggttcttgtttaaacataaacccattcgataattagcaaacagcccacttctaagataaacaaataggagatttggactccaaaagccccaccctagatttctcccttcccacctcccagctgtgggggtagataagggggataagggggatggagaaagctttccaggagacctgggctcagaatcttcagagataggaccccctggcatgaaggtggcctgggcaaggaagggaactgtcactaagtaacacctcctccctaccaggcatggtactaggtgcctttatttacagccctgtcgtctcctttaagcttcgccacaccggtatcatgatcttcttaacagaccaggaggctggggctcagaggtggagtagcatgactgaattcatgtagccagtaagaggtggacttcgcacgtctggagttaagtctgtgtaacaccaagccaatgtttcaatgccctctggccagccccaggaagcaaagaggagtcctcacaaacatcagaaaatcctggggtcacaccaaacctgaacagtaccagcttttgctctctgaaaaaatgcaggccagttgcagcctcagttttgccttaaagaggaaaaaagtactacctgctctgcagaggtctaaagcccaattttgaggactggctgcacaatgtacaatgtcaaagtctacatgcaggcaaggggctgtgaaagtgcgggacctagtacaaacatgtcctgtatgtcccctcgagccccggacactgaaacagtgactcccaaaggacaaggtaaaactctgagctcattccaacacccccaccacagagctgtcctattagccaagagtttgaaaggaaatgggtgactcaggcaggctacgctagcatgcagtgactcacagcgctcggtccagccccttaccccaattttaagcattcatttggaaatcacactcgcctgtccagtccgggaggttgaaggacagctaggagccaacttctcccaacagggagatggggctgggagcccagcctggcttccccagctcctcattcaggcaggctcagcactccaagtccttggaaaagccctctgtttctaggagctggggatggcaggagctgaatgtccccccgccaccccaacttctcttctgagactgggatttgtttagactcttcaccaaggaggccagcaaagggcccctcccctcatcaatgggctctctgggcaggaaggacccttggaaggcaatggtccagcctccttattttagagttggggacactgagacccagagacagggcatgtttgctcaaggtcacccagcaacgcagaagtaggacctaaggtatctaccttcaaacccagcaaatttcctcatctggaatattctgaggacactcaaaccagacaccttgccctatcagaaggacctggttctgaccttaggaagccactgcattgttccgagcatcaatttcctgtaaaaatagagaaaatggtacctcgcagtactgggagatactcatactagcaataaataacagtaatgaaccatttagaataaagttacatgcacgaatttattcattcatacaagcatttcctgagtacaaactaggggacaggtatttcacaaaaacaaatagagcagagttcctgccctcagtgtgcggggggagagagggagggattcagcatttggtggagtatgttaattccctcaagttaattccttcaagagagagacctcttttgaatagtaggtacttaagttattaatcaaattgagagatggaaaggactctggaggctaccctgttcaaacctttcattttaaggtgggggatgtcagcccagcggggaaagaggcctccccccaacctcatggaaccctccaaatcatggcccaaatattttcgtgggtgtttgataactccctgggctcaagaagtcccaagagctctcactgttcactcaagggtcctagaagcccctaggcttccgcccccacccctactcccatgtaatcaagaagaggacgctgtagaagaccagaaatgtccttaagctaaagtacacttgataggtgataggtgggggacacttccccacaaccgcctgggcccggggccaagtcagtaggctgtgcccctgggtaggaacacctttgggtggaggggactcccaaaacaaggctgcctttaattggcctgagagggagtggcaggaaggcagatcagggaatgctcccagctggacaggaagaactggtttagtatagcaagcccagccaaacagaggagaggacagctgggtactgagcctgggttcccttccaaaatatgggggtggtaaggggaatgatggaacagtcgggggaacaccacccacaatgggagggctactagtcagagatcctggggtcctggatgccctctactaacccaaagtagtaccattttacctctcacatttgggaagtgggcataatagaatccccatgtgacaggtctttttgtgaggacaaaatgcaccagatctgtcatataaaaagtactctatcactcctaactgctattagcaaagtccttctccctgggcctcacttttctctacctgcaaaaagaaaaggacacgctggatcatctcttcagtccgagccaaccgtgactatgtctgatttttccaaccacaatctagaaaagagggaggggacaggccaaaggggaagccctgtgccccagttacaggcaggaggtctgtgacattagccaggaaggggagagctgaggtcaggatgagacttgacacctatctcaggaagcagctgcccagggctgatgtctcctgcagctgatgggtcacccaggcaggactgacacagtccccttcccccaaactacatccttcagaatgcccccaggacacagctgactgctcagcaccctgaagcacctgaaggctcagcagcccctgggaggaaactggcatgtgactgggcacacggtgacctcagcaacctcctgggtcctttcctctttttccctgtactgcctaggtggtatcccttcggatgcttccccagttgcttgacccgacacatccttcagggcctagtttagagcactgtgctagaggcagaaggcttgggtcctcagccactaacattttaggcaaggtagcctttggtttaggttaagtcatcacctcactctggccttgtttccttccacctcagaattcctttgccttccagcctaaaatctcaacctattctaaacccgtctttagttaccaacgatgggacacctggagtagcacaaagagtagaagttaagctaaagcagaaacttgaaagcctggctgcctaaatttcaatctgactcacccatttattgtgtattaactgtgtgaccctgggcaagttacttaacctctctagcctcaggaccagtttaagaacagtacacagtaagattgttgttggaattaagctcctggatatacccattagaaagttattagagcaatgtctggccccccgacaaaggcgctccacgtttgcaatcatcatggcatgcctggaattgtgctggaagtattgcctagggtctcattcattcctcaagaagagcctgcaggcagaatcaaccttccgctaagtaaattcagaggaacaggagccccaaggctttcaaagaaattaacattaatggttaaactgcaaggactcactcgctctgaaaactggggctaaagggcacaaagggggcacaaagctcaggctgtgggggacagattgccttcaccagtaattcccatgccccccaacttcccagatgagattgcccccctcctcctaagccggctgcgggcatggatagagcttctgctggcccagggacagctatgacggaggccagtggacagtgagaaggaaaggtttccctgggctgattgaggccttctctcccccctacccccttcacctcactcaaggtggatgcttcaattttcttatctgcaattgagaaaaaatgaacacacttcttgcagaaagcagaggctcagctcctggctaagtgttgagtctaaaccattcctctcctctgtcctcgaaaagagcagagtccccaactttctagaaaccctaacgcagtgtcccctcttgccccattccctcagacccttggtgcagtattgggaagagattcagaagggcaggactttgccctaagtcacaagtcaatgacagagctggggccagaactgaggttagggctcagttctccttggtgtgtgaaagagggcctcgcacaaccctaaaaccctcccccttccgagtacacgcagccccccgacccccagggccatctcggatcctaaagctgtctgctctgggcgccccgagagcgaggaggggattcagcgctccaagcctgccccagggtcaccagggaagggacgagggtgtgggagttgaagagttgacaccggcttagtcactaacgagcccgtagcccgcggcggggctgaggcccggggaggcgggaagagcaacaggcgaggggcgcacggcgcgtgaagccatcccggaggctggcccgtgaccccggagcaaagtttccaacaaagtttcccgggcctcggtgtccggttgggggtagcgtacccccgatctgcccccccccatcccacgctccgacgaacaaaggaggcaccggcctgcgcccccgcttcgcccccagcccgggaacctccaagcacccaccgactcggcgactccgcctacgaagaacagcagcagcgcgaacagacgggcgggggccatggcaccgcggactggagaaggcgcgcaggctgcggcgagtggccccgggcgggcgcgccacccatcttataggcggcctaccggccccgccccggcccgcccccgccccgccgcccgcaccccgcccggaattccccagtggaagcgaggcctgcggggcactgcgcccgcccgcggagttggaaaccccaagggacccgccctgcccgagcccgccggctcctactcaacccctagtcctaccctccgggagctccaactccctttatttatttgacccactgccaggcaggtccccagagatcactgcggctaaccccattttatagttggggaaactaaggcccagggacgggaaggacttccctagggtgttgagtttagaccagccttcataccgggtgtgctcccctctgaagacacagaacttcccaaatgggatgtgaaccgtgttaagacaggggacagcaaactattctgtaaagggctaaatattttaggttttgcgggccatacgatccctgtggcaactattcaaactcgagcgtcgtagctcaaaagcagccataaatactaaaggaatgagggcagctaggtcctaataaaacattatttatagacaccgacatttgaatttaatataattttcatgtgtcacgaaatattattattcttttgactttattcccaaccatttaaacatgcaaaaatcggctgggctctatggctcacgcctgtaatcccagcactttgggaggccgaggaataggaggatcccttgagcccaggaattggagaccagcctgggcaaccataatgagacccccatctctacaaaaagtttttaaagaaattaaccaggcattgtggtgcacccctgtggcccagctactctggaggctgaggtgggaggactgcttgagccagagaggtgaaagttgcagtgagccatgatcgctcactgcactccagcctgggtgaccgagtgagaccctgtctcaaaaataaataaataaataaataaataaataaataaataaataaatgacattttataataaaaatgcaggccggatgcagtgagtcatgcctgtaatcccagcactttgggaggctgaggcggcggatcacttgagctcaggagtttgagaccagcctggccaacatgctgaaaccccgtctctacaaaatacaaaaattatccaggcatggttgcctgcgcctgtaatcccaactgctctggaggctgaggcaggagaatcgtttgaacccgaggggcggaggttgcagtgaactgagatctccccactgcactccagcctgggcaacagagcaaaactccgtctcaaaaaaataaaaaataaaaatgcaaaaaccattcttagcagtgggctgaacaaaaataggcggtgggcctcagccactctgagaccactctgacgctggtctcagagtggctgacgtctgttctaagggcttcatctaccagattttgaactttttcaaaagtttgatctctctgagaactggtctgcaagtttatttccattcttagggtaagcttccaccctttataagagaaagttgtgtgtcctccttacccttcatcctcctaacagtgcattggtgggagcaggttgagggaagaagtggaggggggtgctatatggagactgtaaaattctctgggtccccaagcacacgtactgttggaattattgcagggtgtgaaggtgggcattctacgatgatcgaagtacaaaagaagcctaaccctgtctctccctgacttatgtataaatctttctaagggtgtaacatagccttagaagtaggacattttggccactgttggcatattatgaattcatatactttgtggagtggagaattggtagtgacttccctttttccacctcttaattattatcaaagaataaaagtctcttgtggcagagaaccttggcagtaaagcaaacttcaaatgctgaccacggggtttccacagatttaaaggtaagcaatgactttcagtggtttttaacatgcttccctaggatttggaacaaaactgagaaaatgaagaaatctcatgccagaataagaaatccttttgcaagttaaatggtttgcaatctttgctttccacaaaattgcaggggggcctaatctagttgtcagtagatagatcattaaatatagaataggtaactgtgattttagttatctattgtcacactgttgtaacaagagttcttctgttcctaccaacttttataagtttctcagcacttacagccagtggtgtgccagtaaatgtttgacaattggctaggggaagtggcgagtgctaatttgccaatttctgtagtgtaaatactaccagcatggctgatttcaagctaccaatgagatgtcactgaacatggagctgggaagatatatttctaccacacagatacaataggtgcaaataatctcaaaagcatggataacagtaaagtgtagtgagataattagtaagtgatgagttttgagtatttatttcctttatggttttgtttttgtttttgtttttttgagacggagtctcaatttgtcacccaggctggagtgcggtgacgcaatctcggctcactgcaacctccgcctcccaagttcaagcgattctcctcagcctccagagtagctgggactacaggcacacaccaccatgcccggctaatttttgtattttcagtagagacagggtttcaccatgttggccaggatggtctcgatatcctgacctcgtgatctacccgcctcagcctctcaaagtgctgggattacaggtgtgagcaactgtacccggcctcctttttttttaatataattgtatgttcatataaattaatttttagtaatagttatgtttaacaactggctaatgacataaaaaaaaaagcaacaaaaaaaaaacaggatctctctctgtagcccaggctggagtgcagtggcaaaattatggctgattgcagcctcaacctcccaggctcacgagatcctcccacctcagcctcctgagtagttgggactagacatacgccaccacgcacagctaattattattattattgttattgttattattattattattattattattttggtagagacacagtcttactatgttgcccaggctgggtttgaaggcctgggctcaagcagtcctctcaacttagcttcccaaagtgctgggattacatggcacccagccacaaaatttctaaaaattgactttcatgaaccactacaagatggctttaccacaccatggtttgacagctataaaaaatgaaaaataggaataaaattattgctaaaacctgtttcattctagcaatattcgttgaggtgtttgtttgtttgtttgtttttgacaaagtctcactccatcacccaggctggagtgcagtggcacaacctctgctcactgcaaccttagcctcctgagttcaagtgattcttgtgcctcagcctcccaagtagctggaattacaggtgcacatcaccatgcctagctaattttagtatttttagtagagatggggtttcgccacattggccaggcttgtctcaaactcctgacttcaagtgacccgcgtgcctcggccttccaaagtgctggtattacaggcatgagcgactatacccaatctcatggaggttttagtgagctaattggagagaaaaattgccacagccacctaattaagacaggtatttctaaaacaactttactttttctacttaataattatttatcaaagtttgtaggactggtttagagagtgatgtgatttggatgtttgtcccctccaaatctcatgttgaaatgtgattcctaatgttggaggtggggcctggaggtgactggatcctggggcagatccctcatgaatagtttagcattatccacttggtgataaatgaattctcactctcagttcacgctggatctggttgtttaagagtctgggaactccaccttccctgtctcttggtcctgatgatgccatgtgagatgtctgctaccccattaccttccgccatgattggaagtttcctgagcccctcgccagaagcaaatgctggagccatgcttgtatagcctgcagaactgtaagccaattaaacctcttttctttataaattacccaatctcatatatttatagtaacgcaaacagcctaacacagcaagcatatatttatgtcaattgtatactttaaatatgtatagcttattttatgccagttgtaccttaatgaagctgtttaaattattgcaggactttttaaaagagtcatcagtaagcctctgacgcattaaaaaaaaacacattatgataaaattttgtggtggaacatggagtagaaatttgacttcaaatagaaaaagaaatgatgcaaaatgtctgactcttagaaaagagcttgttcatgtattttttaaatggatgattgtaggtatcgaattgctagggcatttaatttaactggatacatttaaaagagtgatgtaattgttttacttttacgtgtataaatttacaatatgccagaaattacaacctttgcaactatttaaacttttgatgaaaaatgttaagctatcaactaaaaattatgtcaaggagtacctagtcttaaaataatcatttacagagtacactagcaaaaaaacaaaaacaaaaactgaaaacagctcgtttagagagttaatggaagttcttctataaaactatcttaacctcctggaattaaggaaataatttccccttccccaagttctgagaatctctaaagggatgcaacatgtttgaatataattatttgtggatgtatgggtctttaacctgggctccatgactgggggcagaggacacatgcatggtcagtactcctctaggttatgtgtctctgcatacattattttggggcaagaaacttcagattctttctttatatccacaaaaagaggatgtttgggggatcctccttttgggtgatcctgacccccaaagagttaaaaataatttgtccaaaacctgagattctttgagaagttttattgggttcttctttggcctccaaaaaacaaaatgcagtagtcaaaggtttgtaatactgaataggagttcctaatttcctgcatggggctgaggtacaaaaacccaaacaaccaaacaaaacccacagtgtttacagccagaagttcttcattaaaatcctgtttccaggacttgccaactggaggaaagtttgtgagtccctttgctcctccctacaatggagataattccctcttgaactaattaggagaatggaataaggtgaagtggtgaacacataacatatactcacctatgttgggtccagcactctttctgtatattctaacctgagattgagtgagtctgagagatggcattggtcaaacactttacatcctccccctagcttcctttcaagcaaaaggaaatgatctaggacatcaacaggcagccccctcccatggagctaaaaaatgagctcagacccagcctatagcagaggtggtgtccctcccccttttctcagacttcctaggccggagttaaccaaggctaggtgcacacctggtacatccagagacaccttaaatgctaccttctcctggaatcctccatcctcttcttttaattctcatttcttcctgccttgaggtttctaggactctatctgtcccactctttgggcaggcatccctttctcactcatgttagttttaggtgaagagcacagtcttcaaagttaaagagacctagattgcaatcttggtggtatggagcaagacactttttctctctgtgcctcagttttctcatgtgtccccccatgtaatttgagggtcattatagttcttaacatcataaaaatgttaagactacagtgcttagcacaatacggagcatcaaagtgttatctatttttataatcaagggggcctccccataagagtcttgacttactcccctccccagcagctcctcacacatggttaataacaggtaacacattactattttcagaacagaaaaaggattgggccatagggctctcgcccaggatggtgccaaccctttctggtcttcctcagtttatgtaaatctctctccagctacagataatgacagcttagagtttccaggggctgtggaatgtccagccactgccttgcataaccacagaaactaagaacactaggcccagaagggtcctctcaaatcattcagtccaacagtacccgcattataagataggcaaaccgaggcccacacggtgaatcagcatccaccacaggcattttgaagaattctaaaaataacacctccaattactctttccacttgctttgctttatttttttgtcgtaacatttcccttacctgccatcacgcacttattcttttacttgtttattttctgttttctctgccacatgtaagtttcatgagggcaagaacattgttgtgttcacaactgcatcccttgcaccttgtccaaggtctggcagaggtttacattcagtaaatacttgtcgcatggataactggatgaatgccatttggacattttcccttagaggctcagatgtagcaattcactcacttggtcatttatccaaaaaacatctgatgaatatcttgtatgtgagaagctttttgataaatcctggtgaacaagacctgtccgtgttcttaagcagctccctgattagcggacaatagctgccagctatacagtagactgaggatctactatatgccaagctgtgggctggcaactttatatgcatcttctctgtcttagctcagttcttgcaattgcgaggaaacatgcctcactcaggactccttaagaaaaggcttaggagttattaggaggaccgggagggctaaaggttaaaactgaaagggaaacatcaaggactgagatgatgccacagactggctgactcatctcttgctctttaagcctgcttattctttctttaagagtgtctcttctttttcctggatgtgtgcctctctctcttttactgacttactggttctctcttctagtctaaattttgggaggggaccacaagactcattggcttggccaatggccttccttattccttaagtaagcgcctgcagcccagaccactttttggattactatttggcctagaggttgaacatttagcttctcacataccctgagcagagtgtatgtttaatcagaagggagtgttgagcatcatcttcacttggatgctgtgaagtaagtagttttatctctattttacagatgagaaaacaggcggagcaaggagaaatgacaacaaaaccgtaactgtaacaaagctgccctaacccacctgcaaatctacaattgagaaatccatttctgttgcccctgagatttgtggggtgtttgttaagtagcaaaagctgactgatacaagattcaaactcaagtttctttgattctgtctgcatcaccatgctgtctcactgaacttacagccctgattcctgttcctgattcccaagtgtcctgtcctaaaaggagcagagataaatattgtattcatccattttctgatgttataacagaatcccacactgttggtgttctgagtatactgacattccttgacgctagattttatattgttgattgacttgtttatcatctctctcctctatgagattagagtattttctctttattcactttattcatttatatccataccacctggatcagtttctggcacataataaatgctcaatgaatatttatcaagtagatgattgaatgaataaataatgataaaaaggaagtgtaaaaaaacaacttttcatcttaaaacaaggccctgagtcctttaaggtcagaataaagaataatttctaggtagggacagaaagtttagtacatgatggatggggtcaagaatcaaggtaagaaaacttgaaggtgtgaggctgggcacagtgtctcatgcctgtaaccccagccctctgggaggccatggcatgaggatcacgtgagcccagaagtttgagaccagcctgggcaacatagtgagattccttttctacataaaataaaataaaaatagccaggcctgatggtatgcacctgtagtcccagctactcaggaggttgaggtgggaagattgcttcagccccggagtgtgagcctgcagtgagatatgatagcgccactgcactccagcctgggtgacagagcaaggacctgtctctaaaataacaacaaaggccgggcacagtggcttacacctgtaatcccaacactttaggaggctgaggtgggcagatcacctgaggtcaggagttcgaaaccagcctgaccaacatggtgaaaccccgtctctactaaaaatacaaaattagccgggcatggtggcacatgcctgtaaatcctagctagtcaggaggctgaggtaggagaatcacttgaacccaggaggcggaggttgcagtgagccaagatcacaccgttacactctagactgagcaacaagagtgaaactccgtcttaaaaataaaataaaataaaacaacagtacaacaatgaaaataatacaaataaaaattaaaatatagtttcacaactatttacattgtattagatgtttagagatgacttaaagaatgtgggaagattgcatagactatatgcaaatactataccattttatataaaggatttgagcttctctgggttttcatatctgccaggagtcctggaaccaaccacccatggatgctgagggatggctgtactcagaggtccttccacccactgtcatgcctggcatcatccaccctgcatagatagagggtttgcagaaaacccctgatcattagacacagaacacagaaaaccagtttcctgactccctctggtgtgaaggaaagaacagggaggttggggtggaaagttagagtggaaagacagacaccccagatgtttcttaacttttgattattccagctgacaagacatgccacacctcaatgtgtactgagtgtgagtcacttccttctctaagcctcaatttccttacctgtaacatgtggacaatgtttatacctacatccctggggctgttgcaacaataagatgaggtcaggtagatgaaagctgtatgtcactgtaatgtccagtgcctttttttttttttgagacagagtctcactctgtcacccaggctggagt[141 bp omitted]ttctccatgttggccaggctggccgccaactcctgattgcaggtggatccacccacctcagcctcccaaagtgttggaattacaggcatgaaccaccttgcctggccttcagtgcgctttttgttacacactgagaaggaatagtgtgtggagtcaaactggcctgggttggagttcagctctaccactcactggcagcatggctctgggtaaatgtcccttctctgagcctcaggatctgcatgtgttcagtggggctattaatagttctcaactcacaggcttgttttagaaattaaataaggattaaattatataagtgcctgtcatacagtagatgctcagcaaatattcctccccaaacacagacacaaacagcacttaaagcaacctgggtaacaaaggggttttcggtctggaggagaaaccaggcagctaatgagctctctctccagttttccttctaagagaggaactcactggccagagcccaggatggtcaccgatgtagaggacaggcagccaactccaagcctcccacgtggggtttccaaaaacctgtgagcacagagttgcataacgtgtccctgagacacgtgtttctactgaagtgtcttcatcaaatattccctgaaaggaaacatgtgagcagggcagtagggcagcctagcgggggaggaagggagagggggaggaagggagagagggagggatctagagaacacgacagtaggggtgagaggaggaagagaaggtatcacatttaatgtgctcttactatgggccagccaccgggcttgacttgtctgatacattgttagatccttgccataaatctgagatcaggcatttccgttcccacattccagaggaagaaataataacaatcatattaacattgctgaggttaacatagtgcccactgcatatcaggcagtggactaagcacacatttgaccctcaggacagcccataacatgggtactattctgaactccactttatagaagaggaaaccaactgagactcagagacatgaagtaactttcccaaggtcacccagcaggacagcaagacagccagagagccaggattcgaatctaagcagggctctcaagcctatgggcctatgggagaacatttcccaagggatttatgggggtggatccagaaggtgaccttagcgattgtccttacatgcatgcagtggggccccagtgtgaaagtgacgaaagagaccaagtgaccagaggcactcccctcccctccacccaaaggacagtttgtcccagcttgtggcttttcgtcactctgcctctgacctgaagtttaacatttcattcataagtttggaaccacagacttggcagcgtaggaagaaccctcgtagaccagctagctattcaaatccaatcccctcatattacagatggaagaaaaccctgaagccggaatgtgactcgccaaggtcacagagcagttttctgttggatgaaggagccggtttagggtcaactacagatcatcttgtgctgtagttatcaaatgtgggtgcacctctgaatcacttggggagctctctaaatacacagatttccacactctgctttgggagacttgaactggacttaggtttgcaaacaaggactggaaatttgaatatccagtatgttcctcaggtgattcagatggcacagggccatgacagcatctgcaagtcggagtccaatgtccctctttcatttgatagtttgggatactgggacccaccaggggactcgcccaaggtcacatagcaagccagtggggctctagttcagactctgtggtctgaagcagactgcttgtggtcaaatttgaaaatgggccaatgaagctaaacaaaggggttgccatgattttccccagctcttggtttccttcttggatccaaattaagacggaggatgatgtacatttccgaagcttggcaaggcgggaatccaagaactgaactcccaaaggggaaaggaaagggcaggaggttagcttgcacgcccagtggggttttcccagaggtgagctccggactccagggatgacatcagacattccagccagccctaatatcaaaagctacctgtgttttctagttcagcagaatgggtaggcagggcctttcctattgggaggagatggggtggagtgggcccagctgtgacgtgaagggagcagagcccaggaagagccacgcattccagcatctgcaaggaagacagctgccctgggtattgtcaacctctgcagcccttttctaagcctttcctcccatttctccctaatccctcaccccagggctaactgagcagagagattcactgccccttttccacttcctgctactccaccacctattttactatctcccttcctttatttccctctccctccctcccttcctcccttctttcctgttcttttattctaaaatggcatcttggctggacacagcggcttatgcctgtaatcctaacactttgggaggccaaggtgggaggattgcttgagcccagggttcaggaccagcctggacaacatagggataccctgtctctacaaaaaaataaaattaaatgaaaaatcaaaaaagccaagtgcgggccaggcatggtgactcatgcctataatcccagcactttgggaggctgaggcgggcagatcacttgaggtcaggagtccagaccagcctggccacaatggtgaaatcccatctctactaaaaatacaaaaattagctgggcatggtggcacacacctgtaatcccagctactcaggaggctgaggcatgagaatcgctcgaacccgggaggcggaggttgcagtgagccaagatcatgccactgcaccccagcctgagcgacagagcaagactccgtttcaaaaaaagccaggtgtggtggcacatgcctgtggtctcagctattcgggaggccgaggcttgggcctgggagtttgagggtgcagtgagccatgattgcgccactgcaaaccagcatgggtgacagattgagaccctgtttcaaagaaccaaactaaaccaaaccaaaactaaactaaaagtcatcttgatgtttggagtcagttgtcctgaatttgaatctcagctctgctccctgtgagctctctgacctagagagtcacaccacctccccccaagcctagtttcctcccctataaaaaggggacaatagctatattttcagattgtgagaattaaacaagatcatgtaggcacttaagaaacagatgttttctcagaaacactagatcatgtgcataatcagtgaactagaggaatttgaatacatatttgttggactgaattgaggtgcctaaaagaatggttgagctggaaagcacctaagaaatctttgggccttaataactccccaactggagtccaggggaactgttcagggtatttccaaatgataaggacaatcgcacactctcaataaagtctcaagtttctttacttttgtctggaattgtatcagctcaaggtgataacacggctaccacaagctgttcagaaattctgattggcagttacatggctctttgatacgtttttttttttttttttttgagacggagtctcgctctgtcgcccaggctggactgcagtggcgcaatctcggctcactgcaagcttcgcctcccaggttcacgccattctcctgtctcagcctcccgagtagctgggactacatgcgcctgccaccaggcccggctaattttctgtatttttaatagagatggggtttcaccatgttagccaggatggtcttgaactcctgaccttgtgatctgcccgcctcagcctcccaaagtgctgggattacaggcatgagccactgtgcccagcctaagttttttttttaatgagaaaataattactggaaggtagattaaatggtggaaaacgttaatcatgtccaactcctcatttcataaacagggaagctgaggtttaaagaaggaagtggcttgctggtcacactgggtggcatagctggccctaaaacccaaattcttttcctggaacaacttacttcccgtctttccacttcagagagggggaacctaggatcaatgaagttgatgggttttcgtctgctggagtaggaataagtgagttatcgatttgctcttgctttttctgttcttaactcattcagcaaatatttactgactgtccactattcggatttggaagatagataaaacagtcatggcagcagagagggtcaggatttactcctatgtgcgacttcagaacctgtgcctttttccactggacacccacattttaaaacacccactactctgccttctaatatagttcatctgtgtctcagggcaggggctgtcttatatatacatgttctagccttcctgccaccgagtaggtgcgaaatcaatgttgtagtgttgaggaaacacttgaattttatttatttatttatttatttatttatttatttagagacggagttttgctcttgttgcccaggctggagtgcaatggcgtgatctcggctcactgcaacctctgcctcccgggttcaagcaattctcctggctcagcctcccgagtagctaggactacaggcgtgcgccaccacgccccgctaattttgtatttttagcagagacggggtttctccatgttggtcaggctggtctcgaaacaccgacctcaggtaatccgcccacctcagcctcccaaagtgctgggattacaggcgtgagccaccgcgcccgaccaacacttgaattttaatacttactttgctactaactgtgtcgttgaaacagtatgttgctttccttctctggcccttagcttaactatctgtacagcgggaacattggcaaactcctacgtggaggagcttgcaggtccacttcaagttatcagactctaactaggagaaaacattgagaatttaggctgaaaataacgacacagtttatcacctcgttaattcccaaacatcattaccgcgtcctaagccaccccacttgcctctcccctagccgccttcctttaaaaaaagaattcccctctagagggcgcgcaagctctgcggccttcgttcctctcttccgtttgccttcactcttccttctgcgcatgtgctcagttcgctatccggctgcttgtacctggttcaggaggttcaggcagaggttgcacccactacgcctgcgcaacctcagccccgcccctccgctgctttccccggaaacgtttctttcctacgcagccgctcctgccgccgtggtcgctggagctttgcctctctaggccggcagcgcctctcctccatggtcctgtctgtcagcgctgttttgggagcccgccggtgaggccgggccacgctcagacacttcgatcgtcgagtctgtcactggtgagtagaccccagaggagctcgtgtacgggcgggggccgcgcaggcggaatgggctggatttcccctcactctgagaatgggtctgtctgccccgccttccccctgactcttggaatgggctcaccccttggttccagtccctcctcccgggcggggcgacgttgccatggagacaggccgctggctgaggcccggctcgtgtccctgcagggcatggcgggtcagttccgcagctacgtgtgggacccgctgctgatcctgtcgcagatcgtcctcatgcagaccgtgtattacggctcgctgggcctgtggctggcgctggtggacgggctagtgcgaagcagcccctcgctggaccagatgttcgacgccgaggtagggtccccggactggggcgggtggggtctcggcctccccgagtaggctttgtggtccatcactactgtgctgtagacgtggctgggtcaccttctttctttgtagccctgggaaagggatttcacctttctgagcctcagctgcctcatccataaaatggaatgacagcagaggctgattagtacaaagaaaagggcctggatgttaatacaataaacacgtctgtgttccaggcaactctgatacatttcctttctgatactctgggaaagtgacttgatttctctgagctaggttctcaggtgccacatcggagagaggggtggataaaagagcattcgtgcgggtacagtggaaactgcctggactttggggtcagacaggcgtccgtttaagatccacttactagctgtgtgacctggggcaaatgtcacctctgtgaacttgttttcctgtcttcaaaaccatgagactagttgcagagaggtcgtggactgcaatataaagagcatgtgctttgggttcagaaaagcaagggttcagtctaggcctaaacatataaaactagctgtgggaccttgggcaagttgcttcccctttctgagccttttctgaaaagtgggccggatgctcctaccatgttgccctcaacaaaatgttacaaggcccagaggggtttaggaataagaaggtactttgtaaagtgtaaaggaggcctataagttgttacatctaagaggcagctgtggcgtggtgatgagcacagttcttttttttttttttttttttttttgagacggagtctccctctgtcgcccaggctggagtg[133 bp omitted]gacggggtttcaccgttttagccgggatggtctcgatctcctgacctcgtgatccgcctgcctcggcctcccaaagtgctgggattacaggcgtgagccaccgcgcccggccgagcacagttcttaaagccaggagacctgggatggagtccttgctcctgctgcttgttctctgtgttagcccttgggcaagttattatccaaaaagtgataagaattaaaagaagaagaatggctttgtgaggtttttttagggataatatgagattatgtatgtcaaagacctttctttgtcagctgaaagtgtggtgcagatgtttggcatttgatagtattgtgttggatagtggaggttgcacacccaccatatgcctagttgtagtctcgtaggagactctatgctcctgggaagagctgtgggaatgccaggctttgttgaagagccatatgatgcacacaacctgagttctagcctagggatcagcaaacctttcctttaagggtgaagtagtaaggattttaggtcacaattattcagctctgccattgtagcacagaaggctgctatagacaaatatataagtgaataggtgtggctgtgtttcaataaaaccttatgtacaggagcagatgccaggcctatggagccatagtcagctgaacgctgttctagactttactcttgttgtttattactttgggcaacttaacttgtctgagtttttacgtcctcctttgtaaaatgagaataatccctttccacctgctgtgagaaacaaatgaaatcccataatggatgtctatgaaagcacctattggaaataggctgccgtacagatgtagggaggtattatcttctgtgctctgggaagaatgcttgttccttaggaggcttgctgagatcctggggctctgccaagtcacttctccagtatatttccatttgtgattccccctcagatcctgggcttttccacccctccaggccggctctccatgatgtccttcatcctcaacgccctcacctggtgagtatcaccagttttgctatccagcttttgggctcttagtgctgggactaacttcctaagtttgaacatgagacaggctggcacttgtttctggggagtggtggagtaaagtgggtgacagaggccagttctgggaccagctgtataatgggcctccttccattgctgttttgacttacctggaaagctcttatgtcactatgtttgtgctgcctgcaagacaacttccatctcagataacttccctgatgtggagtgagctgagaaaggattcgaccgagaggcaggagaactgggttctgttcttggtttgtgtgccattggccaagttacttgccatgggcctcaggctcctcttttgtccatgagggtttggactcagtgatgtctaaggtcacacgtaatcattgcctgtctcttaagaggcagtttagcatagtggtcaaggtgtcaggctctggaggcagactcatttggcattgaacctcagctttactactagtctagtgactttggacaagttaatctaccacagttgcctcatcagtaaaatggggctagtaatattacctacctcatagttgtaaggattaaataagttaattcacaagaaggacttagaacagtgccttgcatgttattattattcttgtccttacaccggaggttgaaaactggtgggctgactttgacctaaatttgtcttccagataggttctatttggcttacatagatgtcagcccacacatggtgtttaaaacatttttttcacttagttgaaaatcaggctattttatataaaaatccagatttctggcttctcttgaataatggaatgactgactgattccaggccaaccttctagcatgataagatttgcctagatgcaagtagctactgcccccctttagctagaacatgtatgcttcagggtgtcatgatccccaccaattcctaggatcccctagtgacaattgccatcgatcatcaagctcatactcagtcagcttcactcttgacattacccgccaggttcttctaggcgtctggtatcataacccttgcttcacacttatctcgtcacttctgaccactatgctgccgtcctaattgtccctaccctcccaaataacctaaggccaggacaacccagtgacaactcactgctgtcctctccccacagtgccctgggcttgctgtacttcatccggcgaggaaagcagtgtctggatttcactgtcactgtccatttctttcacctcctgggctgctggttctacagctcccgtttcccctcggcgctgacctggtggctggtccaagccgtgtgcattgcactcatggctgtcatcggggagtacctgtgcatgcggacggagctcaaggagatacccctcaactcagcccctaaatccaatgtctagaatcaggccctttggacatcctgctgacacttgggccccttaacaccttgggctgctcagaccctccagatgaggtccagcccagatctgagaggaaccctggaaatgtgaagtctctgttggtttgggagagatagtgagggcctgtcaaagaaggcaggtagcagtcagcatgacagctgcaagaatgacctctgtctgttgaagccttggtatctgagaggtcaggaaggggacctctttgagggtaataacagaattggaaccatgccactcttgagccacaatacctgtcaccagcctgttgttttaagagagaaaaaaaatcaaggatatctgattggagcaaaccacttctttagtcatctgtcttacccccctgggacagctgttacctttgcagtgttgccgaatcacagcagttacctttgcagtgttgccgaatcacagcagttctgttggagaaacgcttggtttccggatccagagccacagaaagaaatgtaggtgtgaagtattaggctgctgtcagggagaggatggcagatggaggcatcaagcacaaggaaaatgcacaacctgtgccctgttatacacacgttcatgtgcacccaagaacctatgactttcttccagttccttctaccaggtccccatcctgctgccagctctcaacatagcaggccataggacccagagaagaatcccagcgttgctcaaagtctaaccatcataaagacactgcctgtcttctaggaatgaccaggcacccagctcccactggactccaattttttttcctgccttatttagaattctttggcgggaagggtatgatgggttcccagagacaagaagcccaaccttctggcctgggctgtgctgatagtgctgagggagataggaatttgctgctaagatttttctttggggtggagtttcctctgtgaggggcttgcagctatccttcctgtgtatacaaatacagtattttccatggttctgcctgcacttactttgtaatgccacggttgagattgagagagatcagcgcagccaggcaagggaactttaaagaattattaggccaccttctccctttcctggaccccagagtcattcctccatttggttaaaatactcagtgcagggaactcttacatcctgtctccttcacttgcagcgtcccctgctatgcctcaggtgaaccacataattcttgggtttccgttcctacttgctagtgatttctgaacatgttcaatggagcggcacacagtctagacccacttccgcattgaaaccttcactgttcctctttggtttcttcagagctttcccaagagagctgtcagttttcagctgtcagtaacacaaatgagtttatggtaacacaaatgagttttgctatctctctgagaagctcatctgacctcctgactctcagccctacagagtagggagttgatgctgacaggatgaagatttaggaataaatatgcctgggaagagactgggaaggttctagggtgaggcacctcagtaactcatggtaccttggccaagttggaaggaagcagtttgttaatgaggcacagtaatcctggctgcagggtctaggaggtaagaccagctgggatgaccttccctgggttaatcaatttccctctagacaacacaaactgcaggcatgtgactaactttgaaagaacacccatcatgtggctgctgtcacccttgaccagccgtggtggtggttactccatctgtggttggagcgcctctttgggattcacttcaaggtcttgtgcctatttttctgcatatcttctgtgatgacaaatctctgtcccctgagtgttaatttgatttttagaaatggccaaaagtcacgtgatccaaactttttttcagtaatatggagactgagctgcatggtagttggggatcaaaaatatgtgaccttaatgagatttttatgatttctaaagtaacaataaaagcagtttttagagttgagttccagagagggcagggcaatggcagtgacatgtttgtcattttaataataaataacatctattgagtgcttaagaggtgtccagcagtgtgggctgagtgctttatgtctcttttcaaaatcttcacaagaaccctctgaagtaagaagtaacgtcatctgtatcttacagatgagggagctgtaaggaacttacccaaggtgactttttaggagctggcagagccaggatttgggctctaatagtgatattaataagctcattttgaagaggtcagtagttagggatgtataagttctgactggctaaacagtctggttaaatagtttatcaccttataatcatatcttcttgtcctgtcaatttttttaaataccgaggatgaatagtactttataaacattactagctttctaagaaaagctgatatgcagtacattaaatatagccagagatttccttttttttttttttttttttttttgaggcagggtcttactctgtcacccaggctggagtgcactggtgtgatcttggctcatcatagcctcaacctcccaggctcaatgatcctcctgccgcagccccccaagtagctgggactataggcacatgccaccacgcccagctaatttttgtatttttatttttatttttatttttttagagacagggctttgccactttgcccaggctggtctcgaactcctgggctcaagagatccacctgcctcggcctcccaaagtgctgggattttacaggtgtgagccaccaagcccaactggccttttttttttttgaaacagagtttcactccgacttcattacccaggctggaatgcagtggcccaatctcagcttactgcaacctctgcttcctgggttcaagcaatgctcatacttcagcctcccaagtagctggaattacaggttggcaccatcatgcttggctaatttttgtatttttcatagagacggggtttcatcatgttggccaggctggtctcgaactcttggcctctcaagtgatccacccgcctcagcctcccaaagtgctgggattacaggcatgagccactgtgcccagcattggccagagattttcagatgatcttaggaatgtgggaaatctatttccaaaggataaaggaaggtacctagataagagagtactagcccactactgagttggcatatctcttaactctccaggtgtctgaagttgacctccctttttcccacccaccacctgaactctggccattcagagagaaaagtggagactcctacatagctgatggtcagaatagtttataacccttaaaggaggacaggaaaggaaaaagggatgtctggctcagagggtacttctaacccctcgctctaggcagccctgtccatatcagtgccaaatgagagccacgatggcagccagcagacatcagggggtacaatgggaagctccaggactcccagcatcctggagggtacacagctcaaacagtctcccctggacaggaatccccttggactccttcctcagcaactcccaggtcagagtagcttccttctgccagccccagaaggcagtcagtgcacaggtatgcaacacctccttgtaccggcagcccagggaccacggagtctcagaggtagggccctggggacctagggcagaggagtagggatggaatcaaggtacaagagaactcctctgtggagagattaaaaaccactgtcttaaggttttctgttgtaaagtaataaagggtggtagaaatagcattgaggcaggagggagtagagggagctgagggttttaatccctgccctgccgctacctgggcaagtcacagtcataggtccaattctggaaggctttagagagctgcagtggagtgcaaagtcctggagtcccattactagctgtgagatcttgggtaagctatgttacctcccttacctagatttcctcatatgtaaaatgagggtaataatggtacttatttccctgggttttgttttgtcttgttttgttttgttttctggtaggtcaacacttacttctttaaaatggaaaaagtgttccctccctggttttattgtgaagatgcaataagatgtcacgtgtaaagcgcctagcccagcccctggcacgtaggaagtgatccataattctagacaattattaggctaccgtcccccctatccattttacagaacagggacatttttcttctgagcctgtgttttcaaatgttgggggataggcttgccagtcctctaggtaccactaccaagtattgagctcctatctggcatgtactgcaaagtgatttatgtgtattcttactcagtccaataaggtaagcactactatttcccccattttgcagacaaagaaacagaggattgggagtaaacaactttttccccattacaaagttggtaagaagctaggcctgtctgcctcatctgcttttcacgttccagttatgtttatgtgtgatccagacaattgtgagacggacagtcttagggatctaaatgccatattagcaaaaggttgtgaatgtaaacgtacgtttggcttgttaacaagcagctagttccataaaggtgagtagttaggtagctgctgataagtgagaaatggagccgggactgactggccacagggctttattatgatggccgtggtgtggcgtgggaaaaggccaaacatttgttcaatgccccacaaactggcttctcctacatcaagcttgatttgcttaaacccccctgaaacagacattagtatcactattttataaacatgaaataggctcagagaggtcatgtgacttctaaaaagtcactcaatataaaatcagattcaaacacttcaattttttcccagttaactgttaagcagccatttctagggtggcctcctccccaaatctgtgttactgggcccagaggaggagctttaggttgaaatggttaaacaaagagagggtggtagtggggagaccctggttgtggaattgtgggaggcaggtggccagaggcctaagtgccggggcaggtgggatgaggtggaaggatgtactgctgggattccctcactcccagacctgccccttgctgccctggccatgctgggtccccgccttcgtatacagccctcccatatattcagtggcgttcccagtgggcaactggggcccaactccggctctctggagcaaagtggaagttgccagtctcactcaggcccaacccaatccagcctccacttggggctccctgggcaggcccccacgaaggctagtgcaagggagctccccagaaagggtcagattttttagctgggagggcgctgtcttgactgcccgctgacagcgcactcaggacagaagttcacgcaaaggttgatggaatggaagagtgagtagagattattttcgaaagttgatgggattgaaaatacccagcaagggaactgcaagggagactgttcaggaaatgggctggagtgcaagctgggtgggaagaccgctgaaagtggttactggggtggaatttgcacgggaattagcggggtggtgggggcggaggtaggcaccgaccgtaggggagctccaggaagattgcgctgggagcaggagctcgggagcacgcagcagccactatgaggtgctaagcagtccccgcgctgtggctccgcccaggctggtccgcgcggcagctgatgcccagtcttggtgcccagtaatggtggggaggagtgtgtgagtgggcggggtgggagggggggagagtccatccaatcgttctccctctgtcccaaactggagatctatctgcatcgctgccctgacccccaatcccggagagctctgtgcccctcgatggctccactgctctcccgagggcgcccactccatgcagcctgcctctggggaatatggaggtcttcgtccggagaaaactcgggctcccttggctttcctctccccaacggcatggttaggaccctgtgactcctaccgacagagggtgaccccggccagatggggtcgaccagggcttggggttgaggtcttcagattgagggtggacctgccatgtcaccctggagcagtagagatgcagtaccagctccccctcctgatccggtgccttctgtgatctgtgaccaaggcaggacacatttggaggcccagctgacatccactttttgacaccagccacagtgcaatcagtttttgacaatcaatttttgacaatcaggtcgcaatgcacgcgcatgacctacagggtgctggggctattccgcctgcctcgtgacttctgagcaggctctcatttcgccttttccctttcttgggaaaatggaatggggagcaaccaggagcccttgctcctgccactttctagctgagtgagcctgggcaagttacttgctgcctccgcgccgcggtttcctcttgcgagctcgcggggcgattgtgaggcactttgcacccaggaagcacacgagcgccctgacttcacagagcgcgccactcaggagactagctcgcggaggtgggggaggggtgctgctcgctggcttctttggttctagactgaccttaggggcctcggggtgggggtgggggaagcctgaagtcgcgacacaggctccctctaccgaaggcctctttccttcatccttcccagccccagacaaacaggcagagtaagcagtattcgtcttaggtgccatatggaagatcttatttgtagactcgtgaatttcgccacccattcctccccttcagctgatggcgcgatctccaccctctgctcgcacctctggctctcgtccaggtcacatcaacctgccagcagaaacctcggtgttaggcgctaagactgtccccagggggcgctggtcgtttggggagcgggcgcagggacaagggtgctgtggtgtctggtaggttggaaatgcctttgctaaaaaggaaaagcctccctttaagctagacccggtgggcactcacccccttcctttcgtgggactttcattctcccacgaaagggctgcggtattttcttctttttttgctaaggaactttctgctcagagtaaatctttttttcctttctttttttttaagacagggtcttgctctcttgcccaggctggagtgcagtggcgaagtcacagctcactgcagcctcgactcctgggcttaagcgatcctccgacctcagcctcctgagtagctgatactacaagcgcaaggcaccacatctggctaatttttaaattttttgtagagacagtgtctcattatgttgcccaggatggtcttgaactcctggcctcaagcagtcttcctgcctcgacctcccaaggtgctgggattacaggcgtgagccaccatgcctagcctgttcagagtaaatcttatttgaggcatgaatcaatcaaacataaatagagagttgaattgatcttagagggaatgggatgcagcaaagccctacttgaccatctcccccctcccacatttggaaatccttaaacccacttatgtaggcctctgactgtgagattcagagccacagcagtttccacctctgctaaggccttcaggcagtgagatggctcacttcagtgcccctccttccacacatctcctagctgtatcctgagacgcctcaacctagtcactacccttctgtatgatgttggtctaaggcttccccctctctggacatgaaggcggagcctcccagcactaccagccacacaccactcaagactccagatcctgaaccctgactctggggcccagctctgggcctggcttggggcttgcatctcacctagcctggcagtgttgttgtcacacccaccttgtatggatgccacataggcatttcaagtgatgcggagcagaagcgggtgcagcggcgcttgacccaacgcagggtggaggatctgcacatcaccctgggcgccgggaggtggattcgtgtgggcagcccctcaaaccagatccactggtcggctacatccagctgcttcatgtgccccatgggagttctattgcggtagggcttaatgaagatgactcgggggccctcggtgagtggttgcctcccctggactccagggttcaagctatcatccctcgatgtccttggaacctcaggctctatatgcttttctttccgtggcattgccgccaatgacgttttctccttgttcctcatccctgactgcacctgggacttccactccttgtactcttttttcttagggtcccctgtggactctaatttcttggacttgagttccttctcggagcacccgatctcctggaactcttcattattttgttttgttttattgcaggcactgttttccctggcagggagaggaaaggcagtcagcacagcaggaccgaggccctggttcccgagacagttgctatgtagccagctcaggggagcctgttaagaaaggctagaggggcctgcaaagaaacttctctactgcccagaggccttgtgctggtgtgaggaggtgtgatgagcactagcagagggatgtgagagattgggaaggtgaaagccatgactagtagttaaggcccctaagaatgaatattgtctacatcatctgccactagattagggttctgtctctctggacttcagctgggagggtgaacagtccagtagtttttctaaattgtgctccaagaaccttagggttctgaggaggtgtctcaatgtcacctcccctgacccactggggcaggatacctctccccagctcataacaacacaattggggcttggaaatagatatttgaacagaggtttcactgctttaataaagttggaaaactgttcaagaccagcctgggcaacatggtgagactctgtctccatacaaaaaaaaaatttttaagttggaaaatgatggggctagatgatcctgatccttctagctctatgtttcctgattgcctgcgactagaggccaaatcagaaagaggagcccagaaaggtggccttgacagaaatattaaatgctgagactttcccaaagggtgtctgtaacagactgggccccctgcaaacccccagtggcaacaccatcctagccaagggcgtggagagagatgaggccttgggctgcagataatggcaatactgtgatgataataatggctcccgctgattgagtcctcgctctatgccagactcgggacccttacaacttgggatccttactatttctgtgaagtagaaggcagtgaaacagagtggcttacagagcacaggtgttggattcagacaaacgggctcagattctgcttctgcctcttaccacctgtgtgatttgggcaagatatttaacctctcagagccttagcttccttatctgtaaaactaggataattctgtctacctaacaggattgttgtgaagaataaactaaatgggaaaattcttaagtgcttaacactgtaggatggtacttagcaggcaccaatcaatgttagctttcttaatactgtcatgtgacttatgaggaaacggtttgaacttgtctcggaggcatggtaaaaaaaaataaaaataaaaataaattaataaagaaaccaagcctcagcaagattaatcttcagatttcaggggtcagtctgcaggtgactctctgggttatattgacttgcaggggaggaggaggaggagtaacctgtctgtctcagtgccccagggtgaagtgagcaccacaactggatgattacaaccattgttatggccacagctctaatatcagacaggaatggcttcacatcctagctctgccacttatcagttgagttaactgaatgagacaagtcacttcacctcttcagcctcagctctccagcagtaaaatagagttaataaatacctctctcacagaggctttgtgaaaattagacttgttctctaaatgccttagcacaatgcctgttcccagaaagacggcatttgggtccattatgggggccaggccccagcttacccagaggagatgcggagaatctttggaacactgagcagtgaatgccaacaccttttggccagcttatgcagttcttggatccggcggtttgagctcttgagtagcttcaagagcgacaagttttttaacacctgccagggtcaagaaaccaggtaaatagaagcttcagctttcctggacagcctccctctcccctgcctgcctctggctccgctcagccaagggccggcctgctggctcccctgggccactcagcctggcaaccaggggcagtactgcatgagtatatgagcttccccaagctggggccaaaacagggcgtctcaccgttctcagacggttccgctcaattactttgctcacaggctgctctgtctcgtcccgcagtttctcatcttgcatctgagggacagaggataagagagacataaacccagaggaatcagccaggtgtggtgcctcatgtctgtaatcccagcactttgggaggccgaggtgggtggctcatttgaggtcaggagtttgagatgcctggccaacatggtgaaaccctgactctaccaaaaaaaaaaatacaaaaattagcgaggtgtggtggcatgcgcctgtagtcccagctactcaagagggtgaggcaggagaatcacttgaacccaggaggtgaaggctgcagtcagctgagatctcgccactgcactccagcctgggcgacagagtgaggcactggaggaatcctcctgaactcctccatgtgcctcttcatttggctgagcatggtttgaccaatcctaggctgggagttttgtcatcttggtctggggacagaactgggagaccattttaactctcctgacctcccttcacccttcaccttttccttttctcccatgctggaaagcccctttccttggcatggtggattctttgttaaggtcccctctagggactcacccccagggtctagtcccaagtctgaccttggaaaccctgctgttcttgggcctcttctttgctgatggactcatgctggggctgtgagacctcagagatgaatggagcaacaccagtgccaggcaccaaccctgttcctctcagttcagccagcactcaggctgggcatcagatggtggtgctggctctgtaccacctgcagctgtgacatcactgaaatgtgacagtagcagggctgggtctccaaggagtgtatgtggcagaggtgaggggtagagggtgagaaagaaatatagacaataggcgacagacagctgtgtgcattgtcacaacctccctgtggggtaagaggattatcccctctttttaaatgaggaagccagggttcaaagaggttgaataatctactcaaggccacactagatctagcccagctagatcatagtgggctggaaacctaaccaaggtctgatagtcaacccatgaaaccagggattcccaaaccatgctcatccattcagtcatgtcgcctgttttgactgggcgcctgctacatgccaggtgctttttcttttctttctctttttttgttttttgttttttgagacagagtctcactctgtcgccaggctggagtgcagtggtgagatcttggctccctgcaacctccgcctcctgggttcaagcgattttcctgcctcagcctcccaagtagctgagactacaggcacccgccaccacgtccggctaatttttgtatttttagtagagatggggtttcaccatgttagcaaggatggtctcgatctcttgactttgtgatccgcccacctccacctcccacagtgctgggattacaggcatgagtcagcgcgcctggccttgccaggtgctttttctaagtgctagaataacagaaaattcttgccctcaagcttacattctagtggaggggaaacagtgtgtgtacttgtaaatgtttaataattggctctctgaagcaaaatgtatatgtgtttgtattataaattttactgatagaaatcaacaaataatagaatcctataatactctttattgtaacttctattagtgagttgcttcttatagtatgcttttcttggattttgcctaacccctccatttatagccaacctatggttgtaatggataaacaagtataataccaacattaatgtttgtattttcatttacactaaacagtaagaagaaggtgaaaaagtgaaacaacagagatattgaaatttaactcatttatcaatgatttcattgacctatttgctgaattagaccatagtttttgaatactggagatatatttctcagattctttttgttatttacaatcgaatagctatgggcaggacacttgcttatgttttctctttttttgttgtttttggggggtcttttttcagatctacatatgattcatatatgatatatttctactctacagatatacagatataaagaatcctaagaacatagataatagtaaaaggtagtaaaaaatagaaagtgacaagtttaagcatttttcaccctatgtttttaatatcacttatttaattggaagttgctatcaattacattttaatgatggccgtgcctaacaaccagcctgcagaattcctagaagtgtaacagtagacttgtgagcccttatgagttagccccagcacgccaatgctacatcagatggaaataagtgcctggagaacagcaaccagggtaaagggaacagggagggcagaggtagagggtttggtatattaaaaaggtggtctaggaaagattcaccaataagatgagatttgagcagacacctgagagagagagggaagaggagaatgaatggtggtgggagaagatgaggcagagagggagtcgtggtgggttaggcagatcacaacaggctgtaaagggcgctggctgccctgaatccctggtgcccagctggctgcatcagaatagtatgaagagcttgtgaaaaacatttttgtgggcaccaccccattcagcaggccagtcagataaccaatcaaatgtgggacccactccacaccattccacttctagtggggagagatgtacatgcacggggggtgggtgcttagctctgaacggaggggtgaggggccaaccctacctaggctgtgggacagcttctcacatataaatatcctttcttattcaagtgaaggttaggtagtgggttaaactgctgctgtggcctaggaaagaaagcaatgtggtaatttggcaaggaagacacagagggtgcaccctctctctctcctgtctacccccatactccttggctgctctgcctgctcagacatacccctccttgcacacaatttcagctctgatcaactggacttcactgaacaatgctgctctgaggccctggtgcctggtgggctgtatcagaatcacctatactcactactcaactcctgagcttccagggctggggaatcactgtgtgctaggcactaagggacagcaacattataggcagagcatgcctctgagttcacaggccaaggggataggtaccccagaaggtagactcctcaagggcagggatttgtgtccgttttattcattgataagccaccagatcctagaacagtgcctggtggacaatgggtgcccaaaaagtattttttgaaaaatgaaataaatagcatgatacgggtaatactgagggttgtaggagcacagaggtggagcctcccaacccagcctgaggatgtcaggggatcttcctagagatggtgaggaggaatgaaggatgagtagatgttggccaagcatagcggtatggggcaggtcgagggaggtgggcagagcattctcaaaagagggaacttaaagaatatgagtgtggaatggaattatgttgtacattggatgttgctagattagaaagcagtagccaagagtggcaggggtgaaaactggagaagtgggtaaagagacctacccaatgacacacagctggtaagccttgtggactaaatccaagactcttgaatgaaaacctccactctttttttaaaaaaaaaatatggcataataagatatggataacacaaaatttaccttctaaccatttttgtttttgtttttgagatatagtttcactctgtcgcccaggctggagtgcagtggcgcaatcttggctcaccacaaccttcacctcctgcattcaagtgattctcgtgcctcagcctcaccagtagctgggactacaggcacacatcaccacgcccagctaatttttgtattattagtagagacagggtttcaccacgttggccaggctggtttcaaactcctgacctcaagtgatctgcccacctcggcctcccaaagtgctgggattatgggcatgagccatcgcactcagccctaaccatttaaaaaagtagttgggtgacattaagtaccttctctttgtacaaccatcatggatatccatctttaaactttttttatcctatggaattggatctctgtattccattaaataataactgcccatttttacctcccccagcccgtggcagccattgttctacttcctgtccctataaatttgactactctaggaacctcatataagtggactaatacaatatttgtcttttttttgtgactgccttatttcacttaacatgtcttccatgttgtagcatgtgtcagaatttccttctcttgtccgggcacggtggctcatgcctgtaatcctagcactttgggagaccgaggcaggtggatcacctgaggtcaggagttcgagaccagcctggccaacacggtgaagccc[136 bp omitted]caccccagcctgggcaaaagaacagcactctgtctcagaaaaaaaaaaaaagaatttctttttaaggctgaataatattccattgtatgtataggccacattttatttctctgttcattcatcgatggacatttgagtttcttctgcctgttagctattgtgaataatgctgctgtgaacaaagatatacaaacatctcttcaaggccttgctttcagcttttgtgtatatacctagaagtggaattgtggaactgccgaatcatatggtaattccctttttaatgttttgaggaaccaccatattgtttttcgcagtggctataccattttacatccccaccaaccatgtacaaggattccagtttccctatatccttgccaacacttggtattttctgtttctttgatagtagccatcttaatgggtgggagttccactcttttgttttatttcctctcatactttgttctttaatttctttagttaggtttactgggatatattttatatacagtaaaatttaccttttttagtatacagttctttaagttttgacaaatgcatactagtgtagaataccacagtcaatatatggaatggcttcataacccccctaagttccctcaagccacctctttgtagttaactcctcttcccactcccagccctggcaacaaactgatgtgtgttttcagtctttatagctttgccttttccaaaacaccatataggtggaatcatacggtatgcagccctttgaatctgtatttctttcacttaagatttgcacatgttgggtatgtcaataatttgggtttttttcattgttaggtagtatttcattctataaatatgccacagtttgtatgtgtaatcattaaaggacatctgggctagtttctggttttcagtgattatgaataaagttactaaatacatttgtgtacaggtttttgtgggaatacaagtttttatttcacttggatacatacttaggagtgggattactggatcatatggtaattatatgtttaactttaaaagatactgccagaattttccaaagtggctgtaccattttatatttccaccagcaatatattcaaggtctagctgactcacattcttggcagtatttggtactgttagatttttatttgtttgttttgtttttagccactctagtaggtatgtcatcatatcttatagtagtgttagtttgcatttccctaatgacgaataatgttgaacatattttcatgtatttatttgccatctgtcttttttgatgaagtttttgttcaagtcttttgcccatttttaggttgtttcttttaaatataattgtgttgagtgttcttcactaattcaggatctctttatcagatatatgacttgccagtattttccactagcctgtggtttatcttttcgttttcttaactatctatttaagaacagattcttaattttgatgaagtccaatcactttaatcacttttttttttttttttttgagatggagtcttgctctgtcacccaggctggagtgcagtggcgctctcttggctcactgccagctccatctcctgggttcatgccattctcctgcctcagcctcctgagtagctgggattacaggcgcccaccaccacacccagctaattttttgtatttttagtagagacggggtttcaccatgttagccaggatggtctcgatttcctgacctcgtgatccacctgccttggcctcccaaagtgctgggattacaggcatgagccaccacacctggccactatcactttttttaaatgggctatgcttttggtgtcatatctaagaaatatttgcctaacctgaagtcacagaggcttatgcctatattttcttttaaacattttatagttttagttttttaaatttagatatttgatctattttttagttaacttgtatatagtctaaggtgtggattaaggttcttcttttgcttatagatatccaattattccaacaggattttgttttgttttgttcagagacagagtctctctctgttgccca[149 bp omitted]cttcaccatgttacccggctggtctcgaactcctgacctcaagtgatctgcctgcctcagcctcccatcgtgtgagccaccatgcccagccccaacatgatttttttgaaaagactacctctctcctttgaattttaaaatcaacttactgatttctacataaaatcctactaggattttgattcacctttggattcattgttctgagtcattccttcctttttctgtgcatttgcagttgagtttttttctcaatctgcttcctgcctgtagaattttgggatgcaaaggcctctttttactttttaagattttttaaaaatttgaaatgattatagagtcaaagatgttgcaaaaatagaaaggtcctgtgtacctttctcccagtttcctccagaggtaacactggacaaagctagtacaatatcaaaagcataaaatgggcagtagtacaatatacaaaccgtgttcagattgtaccagttttacatgcactcatttgtgtgtttcatcaccataaggatctctcttgtgccatctatacctccctcctccattcagtacctaatccctggaaaccactaatttgttttttgtttttttgtttttgtttttgtttttgagatggagtctctctctgttgcccaggctggagtgcagtggcacaatctcggttcactgcaacctccgcctcccaggttcaagtgattctcctgcctcagccccctgagtagtggggactacaggcgtgtgccaccatgcctggctaatcttttgtatttttagtggaggtggggtttcaccatgttagccaggatggtcttgatctcccaacctcaggtgatccacccgcctcagcctcccaaagtgctgggattacaggtgtgagccaccgtgcccagcctgaaaccactaatttattatctactctataattgttgtcatttcaagaatagtatatgaataaaagcaagtgaaggtattaaaaatgttgtatgagtggaatcatacagtgtgtgaccttttgaagttggcttttttcactcagcataatgctcttgagatccaagttattgcatgtatcaatagtactttaaaaatcacagaaagtttcaaaaaatatacatagaggttttgtgtaccctttgctcattttcctccaatgggtgggaaaatcttacatacctttggtataatatcagaaccatgtataaattcaggtaaccaccatcacaatcaagtatagaactgttctgttatcccaaggcttcctcatgctattcatagctacagtcacccctccttcctctcaccccaatccctaaaagtcccacttcatctctataattttgtcattttgaaaatattatatacatggaatgatatagtatgtaacctttcaagattggcttttgtactggcttttccatataatgccctttatatccacttaagttgtatcagtagtttttccctttttttgctgagtgctattacatataacacagtttggccattcacccattgaagaatgtttgtttccaatttagggctattatgcaggtttttgtctccacacataattttcatttctctggaataaccttcaaggagtatgaatgctgccaaacaattttccagaacatcagcaatgttcatacattgatagaccttctctgcattttgacttgcttttagaatggtcactattttattttagctgttttaataggtgtgtaatgatatcttaccatagttttaatttacatttccctaatggctattgaagtttaatacattttaggccgggtgcagtggttcatgcctataatcccagcactttgggaggctgaggcgggtggatcacttgaagtcaggagttcgagaccagcctggccaacatggtga[132 bp omitted]atgcctctgcactctagcctgggcaacagagcaagactctgtctcaaaaacaaacaaacaaatgaacaaacattttaatatgcttatctgccatctctgtatcctctttggtgaaatatctgttcacttcctttgcccattttctaattagactgtttggatgtttgttctagaaaaagagtcttgctctgtcacccaggttagagtgcagtggcatgatcatagctcactgcagccttgaaatcctggacccaagtgatcctaccaagtagctaggactaccggcgcttgccaccatgcccagctaattttttttctttcaagacagggtcttgctgtgttgcccaggctgcttttgaattctcctggcctcaagccatcttcccacctcggcttccaaagcactgggcacaggtgtgagccactgtgcccaacctgtttgtctgtatttttacttttgagttttgaaagttctttatatattctagatatgagtcctgtgtaagatgtgtgatttgcaagtattttctttctaaatttgtatgtcttttatttccttttcttcccttattgtactagctaagacttccagcactacattgaatgaaagtggtgggaacagacattcttgccttatttttgatcttgagtggatatatgacacatatagtatatgtcactaacaatggaataccaaaatatatgaggcaaaaactggtagaactccaaggagaaatagacaaatcccattatagttgaagacttcaacgaccctctttcaataattgataaatcaagtaggcagaaaatcagtaagtacatattttatctgaataccaccatcaatcaacttgatctactggcatttatagagcactccatccaacaataatagaatatacattctaatacaataataatagaatacacattcatatctagctcacatggagtattcaagagatagtacattctgggccacgaaacacactggaacaaatgtaaaatgatagactcataaaaagtatgttctcaaaccacaatggaattaaactagaaacccataacagagagagctggaaagtccccaaggtatttctagaataaacaacacactagactagtaggtagcacatggatcaaaaaaaagtctcaagagaaacttaaaaatatttttaactaaattaaaatgaaaaatatagtttaccaaatttgtgggatgcagcaaaagccatgcttagaggaaaatttatagcattaaatgcatatattagagaagaagaaagatctaaagtcaatctaagcttcagaaagaagaaactagagaaataagagcaatttaagcttaaagtaagtagaaggaaataataaaaatcaaagcagaaatcaatgaaattgaaaaccagaagatgatagagaaaatcagtgaaaccaaaagctgtctctttgaattatcaataaaattaacagatctctagccaggttaaccaattttttttagaaaaagaaagatacaaattaccaatattagaaatttgtttgtttgtttgtttgtttttgagatggagtctcattctgttgcccaggctggagtgcagtggcgtgatcttggatcactgcaacctccgcctcctgagttcaagtgattctcctgcctcagcctcccgagtagctaggattacaggcacatgctaccacacccgtctaattttgtacttttagtagaggcggggtttcaccattttggccacgctggtctcgaacacctgacctcaggtgatccacccaccttggcctcctaaagtattgagattacaggtgtgagccactgcgtccagcccacatgtattatttagaaatgtggtgggatttttggattaatagaagtgtatttaagcaggaatacataaaatcgtcattgctagacttaatatgagatgttaaatgtttgatccaatttttcttcctggataagcttttctttcctatccctaccggatccgattccacatagagctactggatgagtatttgataatgggtctgaaattgggatagacatgtgctgatcttacacaagtccaacaaattaagccaagatgtttgatgagccctcgatgaatcatcattggttagggtcattgtgctgattaagtacccctgtttaaacccagatttatggccaaatgctcaggttgcagtttgtggaggtatgtcatattcagctggattgagggtcatgggcagaggggccaggtgtgatggagtatagtttgggagagtcatcttggtgacccagtgcacaactgcgcctcttgactcatgtattattcagaaatgaggtgtttaatttccatatgtttggagatttacctattatctttttgttattgatttctagtttgatttcattgtgatctcagaacacatgctgtgcgattttgattttcaaaaattccttgaggccgggagcagtggttcatgcctgtaatcccaagtctcttggatgccacggtaggaggatcacttgaggataggagttgaaggctgcagtaagccatgatcggcaccactgcactccggcctgggcaatagagcaagatgctgtctctttaaaaaaattttttttagttgacttttattctgtgacttaagatatagtcttggtgagtgttccataagcatttcaaaagaatgtgaatcttgttattgttatgtgaagtattgtctaaatattaattagattcttttgattgatggctttttaaagttcttatacatccttgctgctttcctgtctagtgtttctttttttttttttttgagacagagtcttgctctgtcgtccagggtggagtgcagtggcacaatctcggctcactgcagcctccgcctcccgggttcaagcaattctcctgccttagcctcccgagtagctgggattacaggcgcccgccaccacacccggctaatttttatatttagtagagacagggtttcaccatgttggccaggctggtcttgaactcctgaccttaggtgatccacccgccttggcctcccaaaatgttgggattacaggtgtgagccaccatgcccacccttctgtctagtatttctatcaagtgttgagagagatgtgttgaagtctccaactttaatagtagatgtctattttttttttcagttctaccaatttttgtttcatagatttttaagatctgttgtttggtatgtacacatgtatgattgctatgtcttctttgtgatttgacccatttaatatctttttttggccctggtgattttctttgctcagcagtctatttcatctgatattgaaattgctaactctgctttcttttaattaatctttgtatggtgtatcttttttcatccttttatgttcagtctacctatgtcatatttgaagtgagtttcttgtagagagcttattttgggtcatttttttcactccgttttgccagtctcagagttataaagtatatttatagactaccggcagttaatgcaattatttgttagggtttaagcctgccatttgattgttttcttttcattccctctgcttttcattcttctcttttatttctctactcttcctatgggttaaacagtttttagaattccattttttttatctatggtgaagtgttttttttaagtgtatctctttgtgtaggttttttagtggctgctttctatattacatcatacataacataatctatgaccatctactggtatcgacacttttgccactttgagtgagggatagaagcctgacctctatttaggtccctttacccttctcctttcataatgtaattgtcttaaatatcttcattacataaattgaatccacatcagaccatgttatataatttctgttttagccatcaaacataatttagaaaatgcaagtgaagaaggatagcccatcatatttacccatatttttattatttccattgttctttcttcactcctgatgtttcgggttttcttctttcatcatttcctttatgtttggagaacttcctttagccattctttcacggtacagcaggtcctcaaataatgttattttgtttaacgtcatttctttataatgttgatgagaaaaaaaaacaacaactgattcccagccatggccactgtctgtgtagagtttgcacattctcgtcatgtctgtgtgggttttctctgggcactccaatttcctcccacatcccagagatgtgcacattaggttaattggtgtatctaaattatctaaattatccaagtatgagtgaggggtgtgtgtgtgtgtgcgtgcacgcattctgtgatggaatggcatcctttccagggtgccttgcaccctgagctgccagaataagattcagccacccaggaccctgaaatggaataagcaggttggaaatgaagaataagtgaatacaaattattgtaaaataaaaatttgtaaagtatataataatcatacaaatgcataacagtaaataatttggtataagagcactcagccagcctgccatatttattattgtttttgaactgcatggtggtaggagatactccttacaatttttgctctgcaaagatttattccttggtttaactcaccaccatgatgactgctgtcactcactgcttatactaatccagcatgacctcactttaattacatcaccaataggtgagtaaataatgaacttccctgttttattaatctttcttaaatgtatgtatagctcacatttattttaatgtttaatactagatgtgtctgggcatttatttagaagcgtggtattgtttttgtgaccagaagtatgctgtatggacttaccttgttaatatcaattagtctacgataaacttgctttcattatacatcattttggttaaagttgcagtttccaagaaactattgatgacattaaggacttactatagttcttcagttaacaaattatgttagtttttccttcatttgagaatgtcttgactttcatacctgaaggattttttcactttgcttagcattctgggttgacggttttttctttcagtacttaaacatattgtgccacttctttctggctttcacagtttctgatgagaaatctgctgcaatttaaattgttgctgtattattggtaaggttaatttctctgcaactgctttcaagactttagttttcagaaatttgtttatggtgtgtcttgtatggatttctttggtttatcatgcttggggtttagtcagcttcttgaatccgtgtgtgtatgtctttcatcaaatttgggacactttcagctttatttctttgaacacatttttagctccaccttttttttttctcttcacctaggactcccatgacacaaatgttaaatcttttgttataatcttccatgttcctgaagctttgttctctctctctctctctcatctctagatcacctgatccagcaggtgatctgcccacgttggcctcccaaagtgctgggattataggcatgagccatcctgcctggctgaaatcctctttttatttgtactctttttatccctgcaaatctaaggtgatgtttttggatatataatcctttttaaaacttgtgggtcactttgaatcttattcaatattactctgttagacaaaagacatgcccacagatttctttgcaataagcccttctctactctaggcttcggctgagatggctaagagacaacaatcagccgtaagatttccagaatcactattgttttgatttggaggatctgtgagacatatccataatttgtttagactctttaaatatgactgaatagtattctgaggcactgccttaagtctttctgagatgttaacaaaatattttacattaatattcttttttttttttttttttttttttttttttgagacagggtcttgctctgtcgcccaggctggagtgcagtggtgcgatctcggctcactgcaacctccgcctcccagtttcaagtgattatcctgcctccgcagtagctggaattataggcatgtgccaccacgcccagctaattttttgtatttttagtagagatgggcttttaccatgttggccaggctgtacattaatattctcagtttcatatttggaccaggctttcctggcagtgccctgtatttgagttttgctaggaagccatttttaaattttactatcatctgctatttggagaggataagcattttctaaatcatgaagtcttagctctttcatgtttaacattctttccttttaaaaagttcagcgtttttcaactcgagccctattgatatttcagctaggataattatttgatgtgtgtgtgtttggtggggggattggggtggtttgaggggggctgccttatacattgtaggatgtttaacagcatccttggcctctgccaactagatggcagtagcaacctccccagctttgacatctaaaaatgcctccagacattgccaaatatcccttgggaggcagtgtcactctcactggagagctcttgctttagtttatccctttgctcctccctttcactataggcagcaagaagaaagcaggtggcgcctttaacattttgcttggaaattgctttacttagatcatcaaattcattaggcacattttctgttttccactttattgaaggcaacagggttgctaatttttgtgtcacagtatagtttccaataatatttacttcacttgtctgggtatggtggctcatgcctgtaatcccagcactttgggaggccgaggcaggtggatcacctgaggtcaggagttctggaccagtctaaacaa[141 bp omitted]aacactctgtcaaaaacaaaacaaaaaaacaacaaaaaaaaccccaaaaaacaaaaaaacagaaaaacagtatttacttcactttcctgcataccctcactgcaccttatctaagggccgaggcttctttaacagcttcttcaaggtgctttaggtttttactatactcttctcaaagtccaattctaatgccactcctgcatattagagtactgttacagcagtactttacccagtaccaaaatctttcttttcccctttaaaaatttttttctttatatgttccaatgaacagaattttaatatgttacctattgctgcataataaactatcccagaatttagcatcttaaaacaagaagtatttactatctcaaagtgcttgagtatcaggaatccaggagtggtttaactgagtggttctgcctaagtttcccatgaggtttcagtcaaactgctggccagggctgtaattatcccaagattttactagggcaattttatcaatttccatactcaatcatgtggttgctggcaggcctcagccttcatgggctcttggccggaagcttcctttccttgccatgcgggcctctctatagtggctgttgacaaaatggcagcttgcttctcccagagtgagtgaccccaaaaatagagtacacactaaagacagaagctgtagtctttttttttttaatttgaattttagaagtgacataccatcatttctggcatatcctgcgggtcacataggtaaactaatggtggcaggaggcagacaggttcctaggtgggaaggggtgggtccttggtgaaaccccaccttcaagccagggatgacctgaagcctgacagccaggcctccagttctgtgtggagtccactacctaaagtgagaacttccttgatgccttttggccaatcagatggtgctttttcctgacccggccagattcatggactcgttgggactacctgcctgcagataggagctacccactttgggtctcctctcctctgagagctgtttggtcagccgataaagctgttctctgccttgctcaccttccagttgtctgtgtaacctcattcttcacggatgctggtcaagaactcaggacctgccaaatgcgggagtaaaaggagctgtaacactttcctggccggctcgctgaggtgcaggtgggagctaaaggggctgtaacacgttcctggctagctcgctgaggtgcaggtggtgacacgttcctgaactgctggagtgaagagtggagacccttctggaggcccagacctcgggattctccgagccagagcggtaacacactagttctcctgccctctgccagcgccaggctgccaccccatgcaacaggaagcagtggcggggccaggccagcccaggagccacaggccggagcagggtggcaggactgaaagagcagtaacacaaatgggctgaaactccaccccctgaaatacagcacccccacctcgctgagcggctgccggtgatgagaaagagagaagagctgcagcccttctgggggcccagatctcggggctccctgaggcagggctgtgacatgctgtaacaccctctttggggctctgcagttcctggtgtctcagagctttcaggtgccactgcgttcccctggtccagacgctggtgcctatagcagaggtcgcttggggtaggtctggtccagccagagccttgcatggagctggtgcctgtgccagtgcctggagctgctcacgtggctgcggcagcttgtgtgcctggctctgtgtggtgactggacctcacgcttgctcacacacccccccaccactccatgcctggcttacccttggtaggcatgggatccgggctgcactagccaagcacagcctgccaggtgagtgggcagaacgagtgggcacaagcaaaactccagcagaggcaccaccagccacagaggttttgcactgaccaagtgacacccaaaggatcccgtgacataaccttggtacagtgtaggagaggactgcccggatgtacatgataggtggtaaggaacattgggaggtgttttgtggctgactgtggccacaaaaatttccattttattccatccaatatgtttttctttttttctttttccttttttttgttttagagtctcgctccgttgcccaggctggagtacaatggcgtgatctcggctcactgcaaactccgcctcccaagttcaagtgattctcctgcatcagcctcccaagtagctgggattacagatgcatgctaccatgtctggctgattttggtatttttagtagagacggggtttcaccatgttggccaggctggtctcgaacttctgacctcaagtgatccacccatctcagcctcccaaagtgttggaattacaggcatgagccactgcacctggctgtttcttcttctttcttttttcttcttctctcttcttttttcttcgtcttcctcctcctcttcttctttcttcttcttcttcttcgactgagtctcgctctatcacccaggctggaatgcagtggcatgatctaggctcactgcaacctccgcctcctggattcaagtgattcttgtgcctcagcctcccaagtagctgggattagaggcacccaccaccacgcccagctaatttttgtatttttagtagagacggggtttcaccatgttggccaggctggtcttgaactcctgacctcaagtgatccgcccgcctcggcctcccaaagtgctgagattacaggcgtgagccaccacacccggcctattttattatttttttgagatggggtttcactctgttacctgggctacagtgccgtggtgtgatctcggttcactgcagccttgacctcccaggctcaagcgattttcttgcctcagcctcatgagtagctgggactacaggcatgcaccaccatgcctggctaatttttgtatattttgtagagatgaagtttctgccaatgttgcccaggctggtctcaaacttgtgggctcaagcgatcctcccagctagtctcccaaaatgctgagactacaggcataagctcctgtgcctggttcaacactttttttttttttttttttttttttgagacagggtcttgctcagttgcccaggctggagtgcggtggtggcatctcagctcactgcaacctccacttcccaggatcaagttatcctcctacctcaggcctccaaatagctgggaatacaggcatgagccaccatgcccagctaatttttatattttttgtagagacgaggttttgtcatgttgcccaggctggtctcaaattcaaggtcaagcgatccacctgcctcagcctcccaaagtgctaggattacaggcctgagccagtgtacccagccatgtattttctaatatcccttggacttcatctttgactcatgttttattttgaagtattgggattgtttttcagttatctttctgttattatttctatttaattctgttatggtcatacaacataatttaaattcttctaaatttgttgaggattgtttttgttgcccagaatatgatgaatctctcattgaatgttgtatgtgcagttgaaaagaatgtttattctgctgttggtgggtaaagtgtcatgaatataattaggagaaattaatgatagtgttaaggttttctatatccttgcttttttggtgtacttattttattgattattgagagagaagggttgaattatctaggtgcaatatagattttttctgtttcttatttcaggtctactggtttttacttcatatatttttgaagctctgttgttagtatatacactcttatgactgttaagtcttcttggtgaattgaaccttttattattaaataataccacttttcctccctggtaatagtccttcttaaatctactttgtctgatattaatactgtcactccaacttgcttggtttcatgtttgtatggtgtgtcttactccattcattttttttttagggatccaattcctctacacatccttttacttttaacccatatatttctttatatttaaagtgggtcttgtggacaacatattattgcctcttactttgctcccaatctgctaatttgtcttttaattgattgtctttttactgatacactggattaaaatctatcaccttgttatttgttttctaatctttcatctgtgctttttttcttttttcttccttgatttggattatgtttcgaaaaggaaaactcccaatctcatgggtgctgcaagtagacaagatgtattgcatctgattgaaatagtttattattcatagcacaacaaacagtgtgaacatcagcatagttgtattggttcccctggtcctacattcaacagatgatgcagtgagcccagatgcatggtattcacacagtgggtttgcattgtagctgagggacctaggcccagcactttttattttattttattttattaattaattaatttatttgagacagggtctcactgtgttgcttaggctgctctcgaattcctggactcaagtgatcctcctgcctcagcctctcaaagtgctgggattacaagcatgagccaccacgcctggtcccaggacatttttatagcaagcagtaagcaagcctgccttggtctgagaaatgatctcacctctcaaaactctagctgtactaacaatcctgaacaaggacccaggtgaaagagaggtctgggccttgtgatcttgacatactcagcaagacacgttggacacaagtggcctagggaggaagcctcccaacattagaaaaaattattatatgtacttgttttcatgttcaacagtcattttaaaaaataaattttattgtatatgtttaaggtatacaacatgatgttatggaatacatagatatagtaaagtgattactatagtgaagcaaacgaacatatccatcatctcacatagttacctattccagcatttttatgattccattttctattattggcttgttacttacacctctctaaaaaaatttttttagtggttgctattgaatttactatatctttaatcagtctatcttcaaataatgttataccacttcttatatatcataaggaccctttaacagcatatttcccattcctccatctcctcatttttactgttgttattgtcatacatttcacttttatatatgctatgaggccacaatgcattgctttagtaaagcagttaccttttaaagtgagtaaaaatgagaaacaatgtctcttatatttacctttattctatctgtttccagagatcatcatttctttatgtagatccaagtttctctcaggtatcatatttcttctgcttacagaacgtccactggtaatgaattttctctctctctttttttttttttgatctgaaaaagtgtatttccttcatgtttgaaagatgtatttgctaggtatagaattctggattggcagttttttgtctttcagcattttaaagatatgactctattatcttctggttatataatttctgatgagaagtcttctgtaattctttgttcctctgtagggagtgtgcctttttcctctagatgccttcaatattttctctttatctttggttttcagcaatttgaatatgatatattaggttgtgtttgcatgtgcttctttgttgtgtttgtatattggcatttaatcttttctggattctgtgagtttcttggctctgtggtttgatatctttcattatttttggaaaattattagctattatatctacaaataaatattgtatctacatatatatatttttttttctctgtttcttctccttctgggatatgaatcacttatatgttagcgcttggatatttgttctggtttttgtttgtttgtttcactcttttctttttctgtttcaatttgagtattctctattgacctatcttcaagttcactggttatttcctcagctatgtcgagtttactgattgatatagtttggttgtgtcaccacccaaatctcatcttgaattgtggttcccataatccccacgtgtcatgggagagaccaggtggagataattgaatcatgagggtggttcccccatcctgttctcatgatagtgagttagttctcacaagatctgatggttttataaggggcttcctccttccccaggcacttctccttgctgctgccacatgaagaaggacgtgtttgcttccccttccaccatgattgtaagtttcctgaggcctcctcagccctttggaacagtgagtcaattaaacctcttttctttgtaaactacccagtctcaggtatgtgcttatagcagtgtgagaacagactaatacagtaaactggtattggtagaatgaggtgcagctataaagatacctgataatgtggaagcagctttggaactgggtagcagatagaggttagaacagtttggagggctcagaagaagaaggaaaatgtgggaaaatgtggaacttcctaaagtcttagagggctcagaagacaggaaaatgtgagaaggtttggaacttcctagagactgttgaatggctttgaccaaaatgctaatagtgatatgaacaatgaaatctaggatgaggtggtctcagatggaaatgaggaactagctgggaactggagtaaacttcacttttgcaatgcaaagagactggtggcattttacccctgccctagagatctgtagaactttgaacttgagagagatgatttagggtatctggcaggagaaatttctaagtggcatagcattcaagaggaagcagagaataaacttttggaaaatttgcagcctgatgatgtgatagaaaagaaaaacccatttttttctgggagaaattcaagccccttacagaaatttgcataagtaacaaggagacaaatattaatcaccaagacaatggggaaaatgtctccagggcatatcagagacctacacagcagcccctcccatcataggcccagaggcctaggagggaaaaatgatttcctgggccaggtccagtgctcccttgctgtatgctgcctcaggacttggtgccctgcatcccagccactcaagccatggcaaaaaggggccaaggacagctcgggctattgcttcagagggtgcaagccccaagccttggcagcttccatgaggtattgggccagcaggtgtgcagaatgcaagaattgaggtttgggaacctccgcctagatttcagaggttgtatggaaatgcgtggatgtccaggcagaagtctgctgcaggggcggagccctcatggagaacctctgctagggcagtgcggaagggaaatgtggggtcagatcctacacacagagtccccactggggcattgcttatggagctgtgagaagagggccactgtcctccagacccccgaatggtagatccaccaacaacttgcactgagtgtctggaaaagttgcagacactcaatggcagccatgaaagcagcagggagggggtctctaccctgcaaagccacaggggtggagctgcccagggctgtgggagcccacctcttgcatcagtgtgacctggatatgagacctggaatcaaaggatattattttggagctttcaggtttaatgactgtcctattggatttcagacttgcatggggcctgtagcccctttgtttgggccaatttaccccttcaatttctcctatttagaatgagggtatttacccaatgcctataaccccattatatctaggaagtaattaacttgcttttgattttacaggctcttaggtggaagggacttgccttgtctcagaagagtctttggacttggacttttgggttaatactggaatgagttaagactttggaggactgttggaagcacataattgtgttttgaattgtgaggacatgagatttgggaggggctggggcaaaattatatggtttgactgtgtccccacccaaatctcatcttgaattgtggttcccataatccccacatgtcatggaaaggaccaggtgaagacagttgaatcatgggggtggtttcccccatccttttcttgtgatagtgagttacttctcatgagatctgatggttttataaggggcttcccccttcgctgggcacttcttgctgctgccatgcgaagaaggacgtgtttgcttccccttctgccatgattgtaagtttcctaaggcctccccagccctgtggaactgtgagttaattaaacatctctcatttataaattacccagtctcaggtgtgtctttgtagtagcgtgagaaaggactagtatactgataagcctgtcaacagcattcttcaaatctgttatatgtatgtgttttttcttatttctagcatttctctatgtctctttttttgtagtcttcatatttctgcaaaaattccccttttgttctttcatattgtctacattttccacaagagcctttcatattcacgtattacttatagttgtcttaagttctgtgtcagataattacagcatctgcatcttgcacctggtcttgctttctctctctctctctttctctttctctctttctctctttaatatagaaacagggccttacgatattgcccagactggtcttcagactcctggcctcaagcattccatctgccttggcattccaaagtgctggattataggtataagccaccacacctggactgctttgtctcttgacagtaggtttttttggtattttaaaagttgtgtgtgtgtgtgtgcgttgtaatttttgtttgtttgtttttgagatagagtttcacttttgccaaccagactggagtgcaatggtgcgatcttggctcactgcaacctctgcttcccaggttcaagcgattctcctgcctgagcctcccaaatagctgggattgcaggcacccaccaccatgcccagctaatttttgtattttcagtaaagatgggatttcactgtgttggccaggctggtcttgaactcctgacatcaggtgatccatccaccttggcctcccaaagtgttgagattagaggcgtgagccactgcacccagcctgtgttgtaattttttattgaattttggacacagtgcttataatagtaaggactgagttcattattatttatgcctggaaattgtcgtatctcttcttctcttaggccattagtgtgggggattcagtcagttttttcaggagttgaattaggtttgagttttgttgtttctatgattacttcagtgtctatatctcctacaaattttatgtagtcatgctagctatattgggtctttagtaattccataaaaattttggcctggcatgttggcttacacccataatcccagcactttgagaggctggagcaggaggatcacttgaggccaggagtttgagaccagcttagacaacatagcaagaccctatctctaacaaaaaataataataataataaaataaaattagccatgtgtggtgatgtgcatttgtagtcctagatacttgggagactgaagtgggaggataccttgagcttagtgagtcatgactgcactactgtgcttcagcctctggacagtgtgagaccttgtctctgaaaaataaaaacataaacattagctgaactcttctaacctacttgtaaggagagcttgtctttctcttgctacacaactgagtgagtgcctgcatcccgtcacttcctggaggctcctgtccttctttggaatgctggttaattggttgctctgcaaccttaggtctctgataagtttgacaaaagttgtgattttgtaaattacccaacaatttttaaaaactgttattagtttgataatgatgctcttcccaggtttctgcatcctagatggaagccggagtctcaagccgtctaccttttcacggtgctattcaacgttttggccacctactcctggcctgctgcttgggtctttcttttgggtgacacccttccagtttagccccctgaaatattttcaggttagatgtttccccctctccattccttctttatggcaaatatctgacaaagagaagggacagaggttcctgatctttcttcatcttgggctcaaaataatccatggagtcgtgttctgaaggatacatctgggccaggcgcagtggctcacgcctataatcccagcactttgggaggctgaggtgggcagatcacttgaggccaggagttcaagaccagcctggccaacagggcaaaaacccccctctaccaaaaatagaaaaattagccaggcatagtggagtgcacctgtaattccagctactcaggaggctgaggtgggagaattgcttgaatccaggaggtggaggttgcagtgagctgagatggtgccactgcactccagcctgggcaacagagcaagactctgtcaaaaaaaaaaagggatacatctctgaaaatggggacatgactgggagtgagctaagctcttatccactgtactcctgacttggccctcattttctgtgctagaaaattagatgaagtatctactctatccattaatgagaaataagaatcaaaccaacccaatgaaatagttcttagaagatgaaaactacaacaggataaaaggggaacaggcacaggataaaagggttgtaagcacagtctctagaggcagtctacctgggcttaaattccaggtccatcacttactagctgtagggcctgggacaagttccttcacctctctgtatctcaacttctgtatctgtaaagtggaaacagcaagaggattaaaagggttaatttttgtaaagcacttataatagtgactggcacataataagctctgtggaagtgttaacaattagggcttacttcctataatttcagaaatttgtggaagacagcagttccctccctttctcagaacccattaccatcaaaacagctaacgattactgagcatttccaaagtgcccaagtcctgtaactaaccattttatataaattatcttataagagggagggattaattattcctctttagtaggtaagagatcaaggatcagagaagtgtttacccagctggctagaggaatcaataggtttacaacccaagagggtctgactgtattgcctgtgctcttaaccattgcatttgttgcctcccacaaactagtttccatgcttgtaaactagtgggaaaattgcatgctgtatttatctcacagggttgttttgagatcccaataatgttaagaggcagtgctttagtgtacagagtgctggtcccctgacagggaaacctgaatgtgtcaatgatttgttcacacttccctccctctgcacatgcccttctccctcttttctgcttgttgaactcatgtcttcaagacttagctcagatatcagcgtccagattttattctaacagtggaggaatttaggcaacgccgcgtggcgggggggtcgaggggggcacaccagacttgtgttctgaaatgacagctgacttgtaatgcagggaatggagtgtagccgggccagaatgagtacaagaaaaccagatagggccgggcgcggtggctcacgcctgtaatcccagcactttgggaggccgaggcgggtggatcacgaggtcaggagatcgagaccatcctggctaacaaggtgaaaccccgtctctactaaaaatacaaaaaattagccgggtgcggtggcgggcgcctgtagtcccagctactcgggaggctgaggcaggagaatggcgtgaacccaggaagcggagcttgcagtgagccgagattgcgccattgcagtccgcagtccggcctgggcaacagagcgagactccgtctcaaaaaaaaaaaaaaaaagaaaagaaaaccagatagaaggttactgcattaggagcccaggcgggaggtggtggggcaaacggaaggaatggtggactggaaagatatttaggaaagagaatcgacaggaaatggaggtgtattttaatataggcagcgagggagagggaggtggcaaggatgactcctagttcctgacttgctcgcggatgtttgtcgaatgaatgatccagtgaccccaaggcagaagtatctcagagagatccccccactcccctccccgcacccgtcaccacgctgccttcggagctctgaccgtaagggggtggatggaaggcaggaggaagggaatggccacggagtcttggtccaggagctgctagactggacacttctagcactggtctgagccaggagacgctgcgaaaagagggcaaacgtttctcctctcgcagttgccgcctcgcccctccacccccgcctggccagcagcgcagcgcccctcttagcaccgtggaggtgctggctccttgccggcgtcggggggcgcggcgtagcggcccacccttccagctctgacccgcccggccggcccggcgcccaccccgcccagtgtgcttggtaggttgggcggcggctctgtctagtcccagagccaggaatcaggggcagccgggcgagtcccagggcaggggtcctccgccgccttgcacctgccctgctgggcggcaccgggtcagtgccctgccccctcctgcgggtcccaactctctctttcccatcgtgcgtcctctggagaagtgcgcgcgtgtaagtgtggcgagtgtggccaagggtgccggaggcagggttcgggtgcgtagtcgttgcgtgggcgctgcccaaaaggcgcagagcatcaagtgtgcgtgggcagaaccggcgcgggcgcccgccgcgggtctgcgcggggcgggggcgcagcaagtgcatccgagcgagcggagactagcgcaccggcgtcggtggcgagggtggtgcagaggagtccggctgggcggagggaggaaggatgggtgcgggtaactttttgaccgccttggaagtaccagtagccgcgctcgcaggggctgcctccgaccgccgggcgagctgcgagcgagtgagcccgccaccgcccctcccccacttccgcctcccgcctcttcctcgttcccggctcccagggcccgtcggtcccccgggagccctggaggcgcagccccaccccggccggcgcggctcgctcccacgcccccgccgcggcctcgctggagcggacggactgagtcagagggggcgccagcgctgcaggtaggggctccggcggcggtgggcgcaggtgccgcggtggaccgcggaggggaccggagcacgaggggaacggccttgggggagcgccctccccccgtcctccgccgacgcctcgtgtccctttttagggaattttttccctcttgctggctccagtgcgggtggggctgagaccgagagggagttctccatttcgctggctcctgcccggcccctggcagcctcctgcccccaaatctcttcaccccctttccagtacctataggtcgcgtaaacaactccctttctccagctctgggctccgcggccccccgggggacagctccttcagtctcgtgagatcggtggggttagggggaggggaaaagagagggggtgtcccagagcccctggcccccgtcagctcccccaccttggcctctccctccccctcctcgctgctggagcacaggctccaggggccctgggtatttttagcgttgtgacctgggcggcagctctaagagcctttcccgggaatcggcgtcagcgcctcgctcctccgccgccagcccgcggccgcacggtctccccagacttccgtggccctgccttggccagtcggggttgggtccctctccacctctgtggcgcccgtggagctggccagggtctgggatacgctgggtgcagatgaggtggggaaggcagtctgcggaggatgacgtctgatcctcaagctagaaactcccttgcctctggtgatgggctcagagcagaacgccgggaaggagatgagcgaatgggaatgaatgcaccgacctgggctggcccatagcctcagtgctctggcagggtctcagcttctcagccctaggggtcaggaggcctgctctgaactggacccagaacccgcctttccaattgctcctcactgactaatggggagataagtcagtgagatgtgtcccaggagggggacgcataaagagctgttggagttcaaaggaaagatggtagtctcctaaatagctcaccttcacaagcagggtcttgtatttgaggcaggtaggttggttatgccattttcagatggggagactaagaccagaaaggtgatttccttaggggcagagcctagtctggaagtcaggcctgtgacttcagagcaagggtttggggtagatggcacatgcgtgtgtacgtgtttgtgtgggtggagagaaaaggaggggcgcgggaggagttgctttagcctttgtctgggttttgaaggatgggaaggggtgggctgcagcactggaggaagggaaccctccaccctgagatctctgtctctatcctatcctgtccctggccttctgaggcaagcggggccaattaaggggaaaacgtacctcctccatttgtgctgaaccaatccctccaacccctctcaggagggcatgatatggagagttgggcattggctgtgttccctgaatacagagtatctctcttgtggtgcctggaactggcatcccctttgtggagcttagggcaagccccgcctctgcatgagacttggtttgtgggacacacttggtttcagggaaggggaaagaggtcaccaagggcagaggtgtccaggccggagccaggggccccactgttgggatgctggctgcagtggggcgccccaagcccaggtcccctctgtcttctctttcgactttgcagctgtacttgttttgctcctctacccgcaggagctgacatggacccaaatcctcgggccgccctggagcgccagcagctccgccttcgggagcggcaaaaattcttcgaggacattttacagccagagacagagtttgtctttcctctgtcccatctgcatctcgagtcgcagagacgtaagtcccaagtcctgagaagagggactggggtagggtagggaggatgtcctgtgggtcctgaatcttgtggcactctctcccctctggttttcttggccctctatgcttctaacttgggacctgacatgtaactctcactgtcctggtgtgcagcttgggtcctcctgacttgcccacttcttgatccgcagcccccataggtagtatctcatccatggaagtgaatgtggacacactggagcaagtagaacttattgaccttggggacccggatgcagcagatgtgttcttgccttgcgaagatcctccaccaaccccccagtcgtctggtatgcccctctgctttggggacttcagtgccagtcagccagagccggatgtcaggctctgaaacgaggctacaaggctgggctggggaagtacacaagtaagggctggaagtgggtgtttctaccaatgaaacagctgcctgttctgattttagggaagttgaccctgagggagaactgggttacacatctctaatccaaaattctgggaacggtcaatctcttctttaattttacatttgttatattaatataattagtcactataattaaaataatgtaaaattgtaatttttatatttggcaacttaagtagttttagtcattataatgatattaatatgtattgagtactttagtaggttccaatactgtactaaagtactttacatatattatctcaatccttacaacgtcctgtcagggtaggtgatataatctctattttataagcaggaaattaggctcagagaagttaagtcacattgtagccagaaggtagataaactggaattcatgtctgtctgactccaaagcccatatgcttaacttgtaagatagatattcttttaattaaaactgctactatttattgatggcttactatgccagacattttataagcattcttaggttttattcccaaaaccctttggggatgtaggtatcccttttattttgcagaggaggaacagagtccttgaaagggaaagtgacttgctcaaagccactcagcagcaataagtgatgtaggtggaacttgaactcttgccattcattgacctgactgtagatcccagacatggtgtaatgacgtggaaggagctggcagtcaggagatggtgatcttaatcctggctctttgctggattggcaaagtcactttggacaagtctctgccccactgtggactttagttactcctggccagataatctttaagagttctctgaagccctgtttgtggcctgaccagcttttctctctgggcagggatggacaaccatttggaggagctgagcctgccggtgcctacatcagacaggaccacatctaggacctcctcctcctcctcctccgactcctccaccaacctgcatagcccaaatccaagtgatgatggagcagatacgcccttggcacagtcggatgaagaggaggaaaggggtgatggaggggcagagcctggagcctgcagctagcagtgggcccctgcctacagactgaccacgctggctattctccacatgagaccacaggcccagccagagcctgtcgggagaagaccagactctttacttgcagtaggcaccagaggtgggaaggatggtgggattgtgtacctttctaagaattaaccctctcctgctttactgctaattttttcctgctgcaaccctcccaccagtttttggcttactcctgagatatgatttgcaaatgaggagagagaagatgaggttggacaagatgccactgcttttcttagcactcttccctcccctaaaccatcccgtagtcttctaatacagtctctcagacaagtgtctctagatggatgtgaactccttaactcatcaagtaaggtggtactcaagccatgctgcctccttacatcctttttggaacagagcacggtataaataataaactaataataatatgccaaccattcgacttcatttttcatattgcaaagatatcaaacccactacatgtctttagctctctaaccgatcccatattcctatcactcactcattccatttattcaagaaatgtttatggaacacccatgctaggcatctggaatacagttttgagcaagacaggctgtactgtatacctgccttcatagagtttactgtttatggaggagaaaatcaagtaaatactacaattcacagtgtaataaatagcatgatgaggaactactctggtaccagaaaataggggcatgttaacctagtttctatggtcactgaagagctgtttttagctgaaggacgattgggagttagccaggcacagtccgtaagccaggcagaacgagcagctcgtgaagactttaaacggagagagcatatccttgaggagctaaaaaacattgcgtttggctgaattgttggatttgaggaaatgaagggagagttaagactgacaaaggtcaggttgtaaaatccgttgaagcctggatcaggtttcagtttgacagctagtaaaagatcatgacttaagatataaagttatttcctcatatagaagttaaaaagtacaggtctacatgaaagctccatcgttactcagcactgggctccttttttgctcttttgcacatggtttgcattcttagcaatatctcacatctaaggtggctgtcaaagccccagccatcatgaccttgagactggcagaaagcaggagaggaaatgggggatgggcaaagagggcacagccagtctattcccatttaggaagaaatttttggaagttctttttttttcccccaagatgaagtcacactctttcgcccaggctggagtgcaatggcacgatctcggcacactgcaacctccgcctcccaggttcaagcaattctcacatctcagcctcccgagtagctgggactacaggcgcacaccaccatgccaggctaatttttgtatttttagtagagacgggatttcaccatattggtcaagctagtctcgaactcctgacctcaggtgatccacccaccttggcctcccgaagtgctggaattacaggcgtgagccactgcacctggccaaccatcctatagtcttccagcagagtctctcaaatcagtgtctccagatagacgtgaactccttggcatgtcaagtgagggggtactccagccattctggctccttacatcctttttggaacagagggctagtcacccagatggggagtttcagaaaggaccaggtttgagaagaaggccataaatttggtttgggacatgttgagtttgagatgtctttgagacatccaagaggatatgttgagtaggcccttgcacccatgcatgtggaatttagataagaggattgagctggaaaaagaaaacgatcagttctcagtgtataggtggtaagtgaagccatgggtgcgaatgacaggagagaatgcccagggagagaatgctgaatgaaagaagaggttataggacccagtcttaaggaacatcaactcatttctcacattcaaaaaaaaaaaaaaaaaatcagtccacctcccttcatacattgaacatcacccatgggatcagtgaccttcagccaaaatcctaaagctttttgtgccacccaaggttgagtgacaaggctgcagtcttcctattgtcccatcctgctctcacccctgcaggaggccagtgtaagtatctgttcctaagtgtttttcctaacactagtgagaaacctgtgggaactccagggaagtaggagtgtccaccagccattccctgtctctaggaagcttgtggagtgaataccttctgtgcaaaagcctctaggtccaagttgagatcatccactgagctgggccagggcccagtcctctattaacttttggggtttttctgggttgcttatgaccttgctgcacatagaagacataatctctgtcctcttgtggcttctctccttccttcctttagagtagcaaggttctatctacctcctgtctgactgtggctgagccatctcttgggctgcggcccatgatcccaatagctttgctgtgcagggcttctcagctcccaggatcaccccccttccttccatggtgaacgatgagaagctagactggcttggttgccgtcaacatgtcaataaatctcttagtagcccaggcacatgatgcgaagattgtggggagcctgccttgagagagggatttacagccctctagagaagtagaattgtttctgagcctatggggagccttcagtttggctgctatgagccccagccctgcctggaaaagtctagtgtcagctgagaccccaggactacttcctagttgggacaataaccttttctcctgccgaaccacaggggcttggctggccttcagaaccatcatctccagctgactgttttttgtttctttgtttttttaaaaaaacttatgggggtttcaaacgtacaacaaatatagaaagaaaaatatcccaggttctcatcatacagcttaaaaaatcatcaaaatagtaccaagattgtatcatctacccaccacatatttttagtggaaagacatttatgataactcttgaaagaaagagtagactataaaacaccatattcaatatggtcactttttaaaaaaatgataatcttcagattcaccatttgattatagtgttgcattaaagttaaaccgtggtttatggcagcccagagcctagctgtctggtttttgaggccacacagtgcctttggaggtgggaggaagatctggagccaactctaagtcaaggagcccagctttcagtctccaagctacagcgtggcttctgatatttgcacggacttgtcatagggtggacatcctgacacacttcggaaaggaggcaccacagctcagaaaaagtttccttagaaggcttacactgtagcaaccccaggagtgcacagaacttgacactgaacagcatggcagagtagggaaaatacagaactgtgctatgatgtcatcttgtttgttcattcattcacacattactgagcacctactatgtgacagtcaccttgcttaggcaacagaaatactaaggtgaccatgagctcttccaggagcagacacagacacaggtaatggaaacaatgtgatgagagatgtagcagaagtacatgaagcctgtagaccactagaggaggagaaggtaagtcttcactagaggtggctgggtcctgaatgatggagatgggcaatttcaaaaggaaaacagagaagtacaaaatagtcataatgatggcagctacctttaaaaaagtattattttgaggtttgatagtgtagactatagtcctagctccatcactcattgtaatctttattatcttagtttatgtacttcttaataataacactcaagcaaccctatcacttaggcactattatctacatttacatattagtgcctaggtgacagggttgagtgttactattaagcacttgctacattccatatcctacatgtacataatttctcatcttaacaacaaccttgaaagtaggtttcttcattatacaaatgaagaaaagtgacacttgggttgatcatgctcatatggattaaaggctggcatagggatttggactcctgtctttctgacatctaagcccatggccttcctaatatttcgtgtctaatggggcaggaacactgaatgcaggcagaatgaaggcataatgagataaagacatctttctgacatttcctttctggaaatgtctggttggttggcgcatatcttggcagacctgcctgacaccaaattggctctttctagaagtgtggtcatgagtgtcaccaagagactgttcatgaaatccttcatgaatgtgtttcccatagggcaggtggaaaaactaaagcatgactttaactttggaactccgaaaaagtcaataaaaagacaagccagtaaacaaaggggtgagggtgcagaagactttaacagacctttcacaaaaaaataaaaattaaattaaaaaataaatggcaaataagcacatgaacagatgcttaacatttttagttaccagggaaatgcaaattaaaaccacaatgagcaaacactacatacatacccaagtggtcaaaactaaaaagtacaaaaaattagaaacttcaaatgctgaccaggatgtggtacaatggagactcatagtttatggaaacataaaatgatacattttggagaaaggtctgacagtttcttataaaattaaacatacacctgctctctgacccagcaattccactcttaaatacctggccaaaggatatgagaaatatacgtctacaaaggagcttgcacagacagcagccttgttaataataaccaaaaactttaaaagtgcccatcaagagttgaatggataaattaataatactacgcagtaataaaaagaattgtggatacatgcaagaacatggatgattctcaaaaacattcttcccatgagaaaaaaaaaagccttacacagtatacatactatatgatttcatttatatttagttctggaacagattaatctattgtgggaaaaaatcagggtactaactgcctctggaaggtgatagaggagcagggattgactaggaaagggtattgctaattttctggggttttaggaatgttctgtatcatgataggagttcgggttacataggtgtgtgcatttgtcaaaactcagtgaatgtgtactttggatttgtgcatttcactgtatgtgaattttacatcaaaatgcaatcgaatactgaactctagttaattatatgcatgcttaactacttaaaggaaagtgtactaatgtctgcaatttactttgaagtgcaccaaaacacaagatggaatgatggatgtatagacaaatatgtggtaaagtacaagtatagtataatgtaaatagtagaatctaggtggtggaaaataggtttattgtaacaggtgctcattctttcaattttgtttgaacattttcgtaataaaagaaccacttatttgggggttttgcagcaaatggagacactagaagctaagaggggcaggaggttcctcttactttgggaaatgcaaattaaaaccacaatggttttcccaaaagtaattgatctttttcagtcaatgtttcctcaactatcaaatgggtaaaatggcagtgaaggagcttcatattattaagcatttcctggtgggtggaatacgccatgaactaggtgcggcctcaagctggttactcgccctgcctactccctctcgtgtcctcccagtacccccttagacccaccagctctgagggaatcttcgcgacctgcgcaggcggtcgctctgataaccgcatcccggtttccgggacgacagcggaagtcacttctcacacgcctttcttattggataccggcttttcatggggccgagcgccgctgggtaggcggaagtagccgcaggcatggcggcggctatgccgcttgctctgctcgtcctgttgctcctggggcccggcggctggtgccttgcagaacccccacgcgacagcctgcgggaggaacttgtcatcaccccgctgccttccggggacgtagccgccacattccagttccgcacgcgctgggattcggagcttcagcgggaaggaggtgagggcgcgagatctgaccagggaaagatttccgtagtgcctgctggctggccggccgtgggatgaaggcaaactttgggggcggggcctaattcctgggtagagttcgggatcctgggtgtggaccccgacgaggtggggatcgtcactcacctgctcccgtttccccagtgtcccattacaggctctttcccaaagccctggggcagctgatctccaagtattctctacgggagctgcacctgtcattcacacaaggcttttggaggacccgatactgggggccacccttcctgcaggccccatcaggtgcagagctgtgggtctggttccaagacactgtcactgagtgagtgcacaccttgggccctgttgcaggccatggagggaatgtggctgggagagtgttgtcatcctgccactgctcttggggacagcacttccagtaggcagcgattccatgggggtagagctggcattggaagtaagaaatgttaccacagatgaataaacttcccaatcctaaaactttcagacctgaggtagcacatgcatatccctggagaggcaaatagcaaacaattaatgcttatttggaggtaaggcagtagaaaactggcaactggataaccttttaaaaggcattcattaatattttttaaatgataataaataccacgaaagccaaccataacatatctgtgggttacaactggccaacaggatgctacatcacagtgttagaggaactgcttttgtttgggagggggcaggtctagttactgtgcctactacaaaccgctatttcccagtggctgctgtggctatcctgtttagaatagaacctttctgtgcagtggttgcaaacaggtctacatgggccacacaggtaaggaatgaataaaggtatttttaaaattgacaaacacaggaatgagaaatatatctcattttcctcttaatcccactataagaaatcaatagtgcaagtatgatataacaagttttagggcaataaaaaggagcagcaggaattgtggcaggctagagagtttgtgtgacattctaacgaggacagctctgccactcagcttctatggattgttgccatgtgggaatagaggcctaatgtggtcagagtcaaatgtttctaaaaattttttgtagaaacaaggtctcactatattgcccaggctggtctcgaactcctgggttcaagcgatcctcctgcctcagcctcccaaagtgttgggattacaggcaagagccaccacacctggcctcatttttcaagagataccagaaatctggaatttaatgtgaaaattggcaaattcaaatatcagcaagtaatttaaaaattttttgagtgctgtgcgggtcaatgttgtgcataccaaatgaagcatgtttatggtttgagtagagctttccggcttcaagtttgccatttttatttgaggcttaaggattggagcagttgaaaagctctgaacatagaattatcaaaagctcctggacaacactaaggaataaggaataagcagtaactccccagcttgccaagactttctctcttgcctcaactctggctcccctaccctttcctgtctactctgctgtcactgtcttccctcagcccgtaattgcctgaaatgtggagcaaatgcttagaattctttctagtgcttattaagttttatgctttctctattactgagagcaaatctcttttgatatttctccaagaaaagaacattaatttaatttgatgtttttatgaaatcctagaacagttgtttttcccatgttcagtgagcttttttggatataagacttctcaccatgatagtagaatcaggacttacctttattcccagagtatacacagggtagtatgcattgttttgcccagcccagcacattcaaggaagatcagtgagctcatttcagctctgatacatgaggcgctttccatggtgtcaggggaagtacatagatgacccagactggtccttgtcctcaagttgcttacagcctagttagggagaaaaggtggtcaggacacgatgctgctgccacctagccatctcccaggagggacctagtaagatgcttggatggtcagaaccgtgactgcacagaggagactgtgcttaaggagggcaggaaaggcttcgtggaggggaggtaagcactggagccggatcatgaaggtaggcagaaagaagttagcaaaggcttgcaaggaaggaagaatcacctgagcagagacccatggggatgcagagatgtccagaggagagtgaggaagaaggggctgagtaggatgagacccagcaagtgggctggctgggggcagcaatgttccagctccatcaactggcccgtctaatagttaagaatacagcctcctcctatcataggtttagcagccagctgtggactttgaaagagggagcagaggtagccccaggacagtgagtggatttgtgtctctatccagtgtggataaatcttggaaggagctcagtaatgtcctctcagggatcttctgcgcctctctcaacttcatcgactccaccaacacagtcactcccactgcctccttcaaacccctgggtctggccaatggtgagataacccctacagccctttccttcttcctcttacctcctgcccaaacctttgcctccttttccctcagtttcctgcttcctcagcctgggctagatcctaagtcccctgtgtgtgcaggcccccaatactgtgccatctctgcatgccttttcccaaggagagaagggagtcctactcccagttgggactgtccagactgtggtgctagaggtggtgtggggagcaggagggtcattcccatctctggaatgtggatcccgaggggtcagagcccaaggcccaccccagacagacctctgtctccctcagacactgaccactactttctgcgctatgctgtgctgccgcgggaggtggtctgcaccgaaaacctcaccccctggaagaagctcttgccctgtagttccaaggtgaggccgcagagcctggcagccgggggcggggggtgtatagagaacctgcgccccatgccaagtgctccatacagggcttctcttatctctttccatctcctccaggcaggcctctctgtgctgctgaaggcagatcgcttgttccacaccagctaccactcccaggcagtgcatatccgccctgtttgcagagtaagtcatggggagtagaggaagctgccatccaggggctcagagaaggtacatgtaaagcatgtggtcagtgtctggctcaggctgagtgagtactgagtggtagatgtgatgacggttattcagggcattggccaagcaccaagaaaacagtggttgcctagcaagcactgaataaatatttgtcatggaaaatagtggttcagaacaatagctatgcgggtgcaattgctagctcagtcacttgccagctggcgtaaccttgggtgaatcatttcattcccctgagcttggtttcccaccctgccacatgacattgatagtagaatccactcctagggttgttgtgatagtttatcaaactgatgcacatacagctgtcagcacggggtctggcacgaggtcaagtgctcaggagtgggtggtagcaaatcgatggatgtgaagatacatagatgagggattgagtctgagtaggagtctttttgggggctgtgtggtgagagtgataccccctcactgctgccatctggcccttgtgatagaatgcacgctgtactagcatctcctgggagctgaggcagaccctgtcagttgtatttgatgccttcatcacggggcagggaaagaaaggtaagttaccttggcaactcatctgtacccacccatgccagccctgccttatctatgtggactaggcctaggcctggcccctgctcagccctgcgctctgtttctcagactggtccctcttccggatgttctcccgaaccctcacggagccctgccccctggcttcagagagccgagtctatgtggacatcaccacctacaaccaggtaacaaggtctccagccacacacacaaacacaccgctggtccccaggaccagcctaccctctctgcttgcttcttagccctgcctttgtgtccccaggacaacgagacattagaggtgcacccacccccgaccactacatatcaggacgtcatcctaggcactcggaagacctatgccatctatgacttgcttgacaccgccatgatcaacaactctcgaaacctcaacatccagctcaagtggaagagacccccagagaatggtgagtgggtggttggttggactgctgggttgcaacggctacagagaaaagactcacaatcccacgtctttgccgttagatgattgggttgtatttagaccagatttccagagtcatatgctgctgactgtagctattccaagctctacgattttgggtaggttcctaaactccccaagcttcagcatccacatctgaaaaatagagtatacttagcaaattggatgagatgatgtgaaaaatggagttagttcatgcatttgcttaatcaaccaaatacttttgaattcatactaagtgccaggcatagagtgttgaataagacagaggacactgcactcaagaaatataagtctactagctagggcaggtgtcagttaattaattacagttgtgttcagttcccttaccaagggaaagagcagaatatcctgagaggacctggattgggttcgaagggggcacggtgttcgtcacgtaagcacttcaatactagcaacctattgtcatcatcgcttgttggctggggaagacagggatgattccagaacccagattgcccagtttcagtggcagggctgttccccatctactcactggcttgggactctgaacatggcctgggcaggtggggtggggagtgattcttacctttggcagctgttaactgttgatatttctttacacagaggcccccccagtgcccttcctgcatgcccagcggtacgtgagtggctatgggctgcagaagggggagctgagcacactgctgtacaacacccacccataccgggccttcccggtgctgctgctggacaccgtaccctggtatctgcggctgtatgtgcacaccctcaccatcacctccaagggcaaggagaacaaaccaagtgaggacctgagtcctgaaccaggcccccagcccgccctctcatgtcctctccaggtcccccaaactctcatttcccagggtagttcctgaagtacctctgaaaagctacacaggcataaagagtaaggaatagtttctcaaaactggaacgggagcctcactgtgccaggttcagaagtaatttataaaacagcaataattaaaacacataatactggtgattcttaataggactgtacaaggacagtagcttcctttttcacttacttttgcctcctttctggagcattgggttttgtgatgattcatagactctttaaggtagggaaagggtttggcaacgttaggcttttgaagctaggaagatagcagagctggagtagatggtgttttgcttccttgggaggggtaaagaggtacagttaattaaatttttttatttctatttttattaaaatttatttttattttctattatttttctaaggagaagataatattagtgcttcctattaggtgccaggcatagcactaaagcacttgcctttctttggtgtagggggagactagtagtaaagtaaaagacctctgaggaagaggttgtaccatatcccaaacggccaaacttaaaaacctttcagtactttagttgattcctatattttcaaacatacggtgaatagtttcacttattttcagcaccattatttgtaccaccttcaaaatctctatttcagacatcctaactgcatattctataggtttttctgttattattcttttaaatcttctcctttggaaaatttcaaacccaaacccaaacagaatagtgtaataatcccctgtacacaccctgcagccttttttttttttttttaagagacagactgttgctctgtcagctatgccggagtgcagtggcatgatcatggctcattgcagtctcagactgctcggctcaagcaatcctcctacctccgcttccctaggactacaggcatgaaccgccatgcctttaattttttcacagaggcagggtcttgttatgttgcacaggctggtctcaaactcctggcctcaagcgattctcctgcctcagtctcctaaagtgctgggattataggtgtaagccgctgcctgctggcatatcttaaagcaaatcttagacattgcatcaattaacctttaaatactttaaggatttttaaaaatgtaaccgtatcattaccacttctgttttcccctgtggtcttaaaaatgtctttttataattggtttgtttaaattgggataaacaaggttctcacattgcatttgctttatactaagttcctctcttgggtgggcacagtggtgcacacctgtaatctcagcactttgggaggccaacacagaaggaccacttgagtccaggagttcgaaaccagcctggacaacattgtgaggctccccctacctatacaaaaaaaatttttttttttttttttttttttttttgagacggatcctcactctgtcacccaggctggagtgcagtggcgcgatcttagctcactgcaacctccacctcccgggttcaagcgattctcctgcctccacctcccgagtagctgggactacaggcgcgtgccaccacgcctggctaattttttctgtttttagtagagatgcggtttcactgtgttagccagggtggtctcgatcttctgaccttgtgatctgcccgccttggcctcccaaagtgctgggattaaaataaattgtttttaattagctgggggtggtgttgcacgcctgtagtcccagctactcaagaggctgaggtgggaggatcacttgaacccaggaggtcaaggctatagtgagccatgatcatactattgcacttcagcatgggcgacagtgtgagaccctgtcacgaaaaaaaaaaaagtttctttttctttaaaattactagactattcttagagcagttttaggtttacagaaaaactgagcacaaagcacagagttcccatatactccctgtctccacacccagaatgtcccttattataaatgtcttgtctttggtgtggtactcttcagtctctcttcatctgtagcagtgcccatgccttttttttttttttttaatgtcatttatttgttgaagaaactgggtcatttgttgtgtagaatgttccacattctgggtttgtccttgtgctagtgtttaacacacccctcctctcctatatttcttgtgtgttggtggttagatttagaaacctgattagattcatgtcccacatttttggcaagaaaaattcccaggtggttctgtgaacttcttcttgcgtcacatcaggcacttggtgtctggtgccccagttgtagtgatgtgaagattgattagccatctgcagcactcctaacaacctctcttgatcgcatcctgggatcactgccctggaaacatcctctcccttttcttagcccctgctttcttcccttgcctgcctggcttctatgctcccaagcccatcttctaggcacccagattgaggctccatggcaagcagcagggacaggggcagcaggtagcctgaccccaggaaagagatgtgggtgaccttgcatgtctccaggttacatccactaccagcctgcccaggaccggctgcaaccccacctcctggagatgctgattcagctgccggccaactcagtcaccaaggtttccatccagtttgagcgggcgctgctgaagtggaccgagtacacgccagatcctaaccatggcttctatgtcaggtgggctccacccccacaggccacctctcatccccctgacctaccctttctgctgcttaccccttgatagggcagccagatgggaacacgggccatctctctgcttctctgtagcccatctgtcctcagcgcccttgtgcccagcatggtagcagccaagccagtggactgggaagagagtcccctcttcaacagcctgtaagtgtgaccacactcactgataacacatcctcagctgcctgctgggccttaacacaggtgaccaggctcctgcaggggagttcagggtagatgttacatcttccaaagagatgtgtagatttaattcaatcctaataaaaatcctggcagtctgtggaatttgtgaagactttataaaatgattttaaagtgcttctagaagaatacttttacttacagcctacatttacttcttgatgctcttaaatatttaatcaagcacttatcaaatgccaagtgcttctgagagcactgagtgtgcaagattaaacaaaacagacttggccctggcctccctttgcttacagtctagaaggaagattctggtctagagagtaatggggttagaggttgggtaggaattgatttactgggttatctaggaaggcttcatttaggaggtggcatttaggctgaaaccaggctaagaaagaagcaaccaagcaaaggcggggcccctttcctccacctcaacaccaggcgtctctctttctttcctttctctctctttctttctttctctttctttctttctttctttctttctttctttctttctttctttctttctttctttctttctttctctttctttctttcttatttattttttattttactttaagttctgggatacatgtgcagaacatacaggtttgttacataggtatatatgtgccacggtggtttgccgtacccatcaacccatcatctaggttttaagccccgcatgcattaggtatttgtcctaatgctctccctccccttgccccccgcccgccgctcccctttatcaggtttagagattgagctatgccttctgttgaaaggttttgagcctaagagaacattggaaacactgtgttgcattgcccaatactgccggaatgaggatggggtgagatggggaggagcagccagtcctgtctcaccgctcttcccctgaccccaggttcccagtctctgatggctctaactactttgtgcggctctacacggagccgctgctggtgaacctgccgacaccggacttcagcatgccctacaacgtgatctgcctcacgtgcactgtggtggccgtgtgctatggctccttctacaatctcctcacccgaaccttccacatcgaggagccccgcacaggtggcctggccaagcggctggccaaccttatccggcgcgcccgaggtgtccccccactctgattcttgccctttccagcagctgcagctgccgtttctctctggggaggggagcccaagggctgtttctgccacttgctctcctcagagttggcttttgaaccaaagtgccctggaccaggtcagggcctacagctgtgttgtccagtacaggagccacgagccaaatgtggcatttgaatttgaattaacttagaaattcatttcctcacctgtagtggccacctctatattgaggtgctcaataagcaaaagtggtcggtggctgctgtattggacagcacagaaaaagatttccatcaccacagaaaggtcggctggcagcactggccaaggtgatggggtgtgctacacagtgtatgtcactgtgtagtggatggagtttactgtttgtggaataaaaacggctgtttccgtggttctttgcctcttgtccttgagtcctgggaagagctggggactggggattgtttgctgagtgcctgaacaggacctcctaccctatgcctgcaaccccctccacaaaaaacaaaaaaccctacctcctcccacctggccggaaatttcttctcctgatctgctccccctgtcctccccatccccatctgattgtgattcccagaactccccgggttgtttgggagtgtttctgaaagcataatccatggccatggaaatgaatcatcctacttcttgggggcattgagagtcagtccacatcagcaagggtagagtggagaggtgggagggctctgggtggtgggtctctaactgtagtgtgcatcagagtcactgggggcacttgtgaaaataatgtatgttcctggggtccagatcctactaattcagttggtctgggtgtggcccagactttgactttttagcaggcttctcaggagctcctgctgtgctctgtcctcagaccacccccaggctttgaagccaggctcattggattgaagcccgccccgcccacctcccttgctggttacataaccctggatttctgtaaaacaagcctttaggcggttgcctcccactgccctcatcttctgtcttttcctctggcacacttggcatcaactgtgtgttatttgcagttccccccacctcctaccccactcagttctcccatcatagtggtttggcctagaatgccctattccaccaaccatgcacacctctcaactgcctggttccctcataaaaccagatgaggctggccgggcacggtgtctcatgcctgtaatcccagcactttgggaagccaaggtgggcagatcacaaggtcaagagatcgagaccatcctggccaacatggtgaaaccccgtctctactaaaaatacaaaaaaaaattagctgggcatagtggcgcgcgcctgtagtcccagctactcggtaggctgaggcaggagaatcgcttgaacctgggaggcagaggttgcagtgagccaagattgcgccactgtactccagcctggtgacagagtgagactctgtctcaaacacacacacacacacacacaccccagatgagaagttgctgcctccgggaagtttcccttgacgtgtccgtgccccacgcctttgcttccagattgccttggacttaacacgtgttccttatcagctggctgctgtcctttgacttccaccagatggtgtgcttcctggaggcacaggttctgtctttcattaagacctgacccatctcaggacatgtaagtgctcaatcagcaaacgctaaatgtattaactgggtatgggctattctggcttgagatctgggatccaagatagggatgggcaaggggcactctggaagctccacatgtgtgagtgcagcagtcttaacacagtggtacaggtgtctctgtagccagcatagatgggctgtgtaggttccttgaagggttttaggagccctcagcacatgcgggtggtatgtgtgcatatgtaggaaggaaaggcggtgagctagtctagaccatgggcaaaggcaatttgttcaaggtgcttttacttgagtttacttcaaaagcagtaaaggagcagactgtaaatgagacaggaacgcaggtgagtggatacacaaagctaagtggtctgtgtagtgtgcctagtgtgggatggagcatgcatagcatggggtgtctgccaagtcagaagagcacagagctgtggcctggctctcttttatacccgcagccctgtcagtacctagaaacgacctccactaccatgccacatgtaacctacgctctggcaacacccacatatttctagatcagacctcctccctggatcttggattcatttacccaactgcctacttgctttctccatttggatgtctaaagacatctcaaattgaatatctccaaaaccgagcttctgatgtgctccaccccaccccaaacaggcccaaccatagtcacctcatctctgtaaaaggtaattcgtgtctttccaggcactcaggccaaatacctttgagtcatccttgtctctctctcatcctgtttgcaccctaccttcaaaataaatccagaatcccaccccttttcaccacctccactattatcagtgaggttttccctggccataccctatttcaaattgctatcctagcacgctacattcacctggggaactgaaaaaatcctgatgcccaggctttacccaaaccagttaaatcagaatttaatgtgggactcacagagtctccaagtgacaccaatgtgtagccaagcttaagaacttggtcttatttttaaagtagtatgaaaacttactgtctctcctaagcattctaacaatggatacttttcagaataagattgtgtaaaacagagaactcacttttaactttataacaatttatgtattgtttgtctttttaaaacaaaagtatatgttgagtttataataaaagtaaaaatttgggccgggcgtcgtggctcacaccactcccagcactttgggaagccgaggtgggtggatcatttgaggtcaggagttcgagaccagcctagccaacatggtgaaaccccgcttctactaaaaatacaaaaattagccaggcgtggtggcgggtgcctatagtcccagctactcgggaggctgaggcaggagaatcacttgaacccaggaagtggaggttgcagtgagccgagatcaggccactgcactccagcctgggcgacagagtgagactccatcttgaataataataataataaaataataatttgatgaagacttaattaaatcaaataggcatctgggaggtctggccccaggtcttcccccagactgaagggtgaccacaggtgagccctttcaatatctgggccttggactcccgctgaggtgaaagtgaccgggtagcctgttggagccagccctgtcccataggctatgggtctcagggtcctctttcccaatagcacttcagctcacttgaggtcttttctgagctggtcatgcccaccaggcagatggcaaggcagggcacagaagctgctgagctccatggtgccaagggctgagctccatgagccagggctgggaggctggaacttatacctgcagaaaaagaagagtccctgtttccacaggacaaaggaaatatcttgtttttgatttcttggaagaggaagcactctgggcaagaggtatgagccgggatgaagtggactccttgtctggaggtggtgctacacaccttggaggggctcctgggagctactgagaatgtcccctaagtcagtattcctgcctcagctgaaatgccagtcttcagcctcatctactgcacacttgagtccatgagattttagagtggtaagtgacctttggggtctcagttttcctatctgtaaagggagtgggctggacaatgaacagctgttctccattcttttgttattggttcccatccagagcctcccagctagttgtctcaacatcccaggggagaaagcatagctctttgtccattggtttatttattcaatttaggaataatgagtgtattgttttatatgaataaccatacttatttaaaagatcaaactaaactaaatagtacaaacaagcgaaatctctccccaaagtctactatggtgctgtgcaacagaaatataatacaagccacaaatcgaattttcaatttcctagtagcttttttaaaaagtaaaaagaggggccaggcacagtggctcagcctgtaatcccagcactttgggaggctgaggtgggcaggatcacctgagctcgggaagttgaggctaatagtgggctgagattgtgccactgcactccagcctgggtgacagggaaggagaccctgtctcaaaaaaaaaaaaaaaagaaaggaaaaacaggtaaaattaatttgatgatagtttatttgagtacagtatatatatcatttcaatatataattaatatgaaataaaaactaatgcaatattttacttttctttatattaagtctttgaaatctgatgtgtactttaaacatttatagcatataacaactaatattagccataactcatgtgctcaatagttgcatgtggtcagtggctaccatattggacattgatgctctaccatataaagcaactatcagtaacttcaggataacctcatcaacattttgttagattgattaacaaaaataattctacaaaaatgaagagtttatggatattgttttccctgaatttttgcatattttcttaatacctgaaggacaattttatggggtaatattttaaaaaataatttgactttttttttcctctttctaggctattgagatttatttatttatttatttatttaagatggagtctctgtcgcccaggctggagtgcagtggtgcaatcttggctcactgcaacctctgcctcctgggttcaagtgattctctcacctcagcctcccgagtagctgggatgacaggcacgcaccaccatgcctggctaatttttgtatttttagtagaggcggggtttcaccacgttaaccaggctggtctcaaactcctgacctcaagtgatttacccacctcagccaaccaaagtgctgacattataggtgtgagccaccgcacctggcccaggctattggtacttactatccccaacttttattctatgctagtaatttgatttgtagctctgacttgtttcttccttgagattttcaatttatttgcagtttttttagtggtgttacctagatcttcaatttatttctttaacactcatttttaagggtcttttaaatttttatttattttaaaatatttatttatttatttatttatttttagaaatgaaatcttgttatgttgtccagggtggtcttcaacacctagcctcaagcaatcctcccaccttggcctcccaaagcactgggattacaggtgtgaacactgaaccactgaacccagcctaatgtcttattttattaaagtttttgttttttaagctgaaagccctcctataaatttttccttttatcagattttctgctgaattcagttatctgtgtctgtttcttttctccagcgtcctttcctttttaattttcttctttttttcctttcttccctccctccctgctttattttctttcttccttataactgtatgtagtatggtgcatagctactctgtcatttcccttcatcttcgtcaggctcagtttgggcaactctgccctgtcctttcgcttattctaattggtgtcagtatattctctttggtttccttctcaccatatctgagatctattgttatttccatccctaccccccaaattgcagtctgaagtttgcctctatacacttctgtggagcctaaagtcatggggttgagggaagaaaggaatgctattggagatgtctcttgactatgatgggcagcctgggctctgctctctggagattttcttaaattcctggaaccacagttggcttcctctagtgacgtgttattccatttttgagaaagtttccctggagctttggatcagccaaccaattagaaatttgagccttggggaatggcaaaccttggtgggctttttatctctgtggagaccccaagagcttgggtgggacttgaattttctggggatgcatcttgactttttgcatgcagttctctaacactcctccccaaaactcatattaaaatttaatccctaatgtggcagtactgagaggtggggtctttaagaggtgattgggtcatgaatggattaatccattcacagataaatggattaatggattatcataggagtgggactggtgactttataagaggaaaacacatagtttagcatgctcagccccctcaccatgtgatgtcctgaactgcctcaggactctgcagagggtccccacaacaagaaggctttcaccaggtgcatccccttgaccttgggcttcccagcctacagaactgtaagaaataaatttggtttttaataaattacccagtttcaggtattctgttaagacacaggacaagaaggctactcagttgcaagcaagagccatttcttatggaaaaggaagtgtgagtcagagtggagccaagaacctctggcaacaggtgcacaattcaatttcagaattgccggggctcagtgattgctctgaacttccccttttaaaacggtagtgaacatagtggtttcctgtgccaatctcgccattgcaggttgggtgcatgtgaggcagaaaacatgtctctttagttcacaggttttcagatggagagaaactctacccacggaacagaacccaagacgcctctttgcagctggacttgatgtagataagctccagaaattggagctgagtttgatgtcaaaataggatgaggtgtttgtttgtttgtttgtttgtttgtttggttttaagacaaactcactctgtcacccaggctggagtgtagtggtgtgatcacggctcactgcagttttgactttccaggctcaagcaatcctcccacctcagccttttgagtagctgggactactacaggtttgtggcaccgtgattggctaattttttattttttatagagatagggtcttgctatgttgcccaggctggtctcgaactcctggatacaagtgttcctcccacctcagtctcccaaagtgctgggattacagtcatgaaccactgcatctggccaagattttttttttttttttttttttttttttttttagtgggaagtagggcagtgggggtaggtggggacgggtcttggaggaagttatattttacatataggaaaattttaactaatctgtctcagtttaaaaacatgtctgcaatttttctggcacttgtcccattgagaattggggtcaatcccctttttgaatctgggctgaccttgccgactccatcatgatcagtagaatgcagtggaagagatactgtgtgatttctgaggctaggtcaaaaaaggctgtccttccatcttgcactcttgggatgctggctctgggtgatgctgatgtccatgtgaaaagtctgactacccagaggccactgctgaaaagaacacatgcagtggacaccggccaacagttccagctgagtttagccttttagtttagcctttctgccaaggccctagacatgtgattgaagccatcctgggtcctccagcccagcccagcccagctgggtaccacagaatgacctcagacatggccacaaggagcaaaagaattccccaactaagccccgcctgaattccagacctacagaatccacgtgcatcagaaaagagttgttgttttgtgccactaagtatggatcctggtaggcaactcactggaacaactggtgagaattttcaggacttttgtattatttcctctttctcctgcacctcttctggaacagagcagttggggataggaccatgacgaaacacatcaagatattctatatttttctgttgctactgctttttgaagtttatggaatgaggttctactgtttcccatggtggtttactgctgctgatttttttttttttacctgttttttttttttctcctatccaattcaatagaaaccagagaatgaacattctattgtgaaactatcctgccatctgcactttactcagtgatatggtttggatttgtgttgccacccaaatctcatgtcaaattgtaatccccaatattggaggtggggcctggtgggagctggttggatcatgggggtggatttccccctttctgttctcctgatagtgagatctcatgatacttggttgtttaaaagtgtgtggcacctcccccctctctctttcgcccactcctgccatgtaagacatgtctgcttcccctttgccttccaccatgattgaaagtttcttgaggcctccccagctatgctacctgtacagctggcagaaccgtgagccaattaaacctcttctttataaattacccagtctcgggtagttgttttttttttgagacggagttttgctgttgttgcccaggctggagtgcaatggcgcgatctcagctcaccgcaacctccgcctcccgggttcaagcgattctcctgcctcaccctcccaagtagctgggattacaggcatgcaccaccaccctggctagttttgtatttttttttttagtagagacagggtttctccatgttggtcaggctgatcttgaactcccgacctcaggtgatccgcccgccccggtctcccaaagtgctgggattacaggcatgagccactgcacccggccattttttgtttgtttgttttgtttttttgtgtttttttttgagacacagtttcactcttgttgctcaggctgaagtgtaatggcgcgatctcagctcactgcaacctctaactcccgggctcaagtgattctcttgcttcagcctccagagtagctgggattacaggcatgtgccaccacacccagctaattttgtatttttagtagatgtggggtttttccatgttggtcaggctggtctcgaacacccgacctcaggtgatctgccctcctcggcctcccaaagcgctgagattacaggcgtgagccaccactcctggtgtcaggtagttctttatagcagtgggagaatggactaatacacccagaagtctatgttttaaatgaaaacttaattttaaatagtacaaaaatatttgtaaggttttttattttcttaatcataaaaagaacataagagattaaataggtgatattaaagaaagaaaaagaacgcccatgttcttacaacactaatacaatacctgtgaacattttgtttctctttcccctacatagcattattttttgtctgttgattgaattccctcccctcccaaagtttttttttttttttttgtattaagccaaaccacaaataagtatcatttatgttagatgccgtgctaggtgctgctgatacaactgagaatatgtcagatacagccccagccctttttgatttagagtctagctggtgaggtcatttaccaaataatgatgcataatcattccataaatacaaatgatggtgttatgaagataaaaagagggtgctcagaaagaactaagggggtacaatttattttattttagaaattcttttagattcagaaagtacgtgtgcaggtttgttgcacgggtgtattgcatgatgctgaggtttgggcttccaacgatcccgtcgcccaagcagtgaatatagtacccaacaggtagtttttcaacttttgctctcctccatccccccttctggaatccttagtgtttattgctcacatctttgtgtccttgtggggatgcaatttagattgaggctcagggacagcttctgtgagaaagtgacctttaggctgagcagaaggaggtggcaggaatgtggagggaagacaatccaggtgacgggaacagctccgaggtggggaagagctcccagtgatggaagaggcagctttgtggccagagctggtcagcatgggagagagtgacacaagggcctgaaagaggacccgtgtggccatggtaagcccattggtgatgaagccaggggcaccaggtggacctggtaaaggaggacagatttcacattcacaagaatcagaatctactgaacgcttttaggcgggtggagacacgatcagcttcattcacttccttcccccatacagtatttacttttcactgaggtgtgatataatgtatccagaaaaaagtgcagaaatgtataacccagtgaattttatagaacattaccagcatcctaaaagcaccccttccactcattcccctagagtaaccactatcttgacttccaactatttgcctgtttttgtactttccatgtaaacgcggtcatccagcaggtgctgttttctatctgggtttttaactcaacgctatgtttatgatgttcatccgttcattacatgtagttgtagatcatatttccttctttaaaagatcacactggctgtagcatgaagaatgagcaatttcaaaattaagcaaaatattaaacagctaagaatggaaataaaattcaagtcaatttcaaaaagaaacacagggacagattttgccagatacctggtacagattttgccagacatatggtacattttgttcgttactatatctccagaattttcctacctctttctccaaatagagaatatttaaaagttttcttaaaaaccctgatatataacatttgcaatgttctctacagtttgcaaagtgttttcctaatgattttctgctttgatcctgcaaaatcttatgaatgccagtaccatttcccttttacagaagaagaaactggctcaagaagatgagacatgatgctttgtagccgaggaattgcctcaggtgtcaccatccccgtccctgcgaattggaatttcaggcgggggcgagctgctggctctgccggcaaactcgccttatcccacgccgccgaagggtccaagctttccagctgcgtaacacgaccaggccccgagcgctctggcccgggggcagatactttcggtttgcagctctcagggcagcgctgccctgggacgcccagtgggttttcacggctcccctgggtctgggatcagggcagctccgcctaagggcgcggcccaatctgagggttcgtcgcccccgcgtggtcagacgtgggaatggcagcttctgaagctctatgtgtggtgcctttctggggctcaccaggtgccatgttgcgtgggaccatgaaactgtggtggtcttgtctctgccacaagataatgtaggcttgggcctcaagataatgtcggcatggtgtcccatctttggcatgagtcctaccctttccaagtgcagtggtggctgattcagtggtggctcccagggatatgataggcaaagggggttcggtctctgctgtctgaaattaatcctgggctcaagagagaggggcgcaggtgaggcctggggctcttcatgcctgatttcccgctacccctctggcttcctccaattcctacatccaagttaactctgagacctgtggttaccaagaagacagtcgatgtgggggaagggcaaaaccaagtacctactatagctacaaggaataatataaaggaattgttccattttgtatattggtatcatcagcttcttgagaagccttttgggtaatttattgtaaaaatcactactttaaagacaaaaatccttaattttaaatgctacaaaatttaagagctcgtttgagttgatgcaggacccacagttccctatagggcgatcactgatgagtgtatgtgagctaaacgcacaggagcttattctcgagagttctcaggaattctccggaattatgagaagcatatcaaccgcttcatcgggggggctccacttggcattttacagggagagttgggcagttcccttctcaaggcaaacagatcttacagtggcgtttattcagataaatatgagagccgtgtgggactggctgtatgatgacggggatatcctcccactgaatatgcctattacccaggtcatggtaaatctgggggtttagggggccccttttacatgggtgcccctcccacagaatcatacaactgtttgagaaggcttctcaacttgtcatccgtcatgggtcttacagatgccactccctgctgggaaccagaaaaggtaaaatggtctggaggtaggaaaaaaaagttcctaggaccagaacataaaacatacaggttaatagaattatgaaatttaagatgtttaaaaaggctttatgtaaggtacttgcaacccctttacctaaatatcttatgaaaatgggtattgtacaaaaattagctatagcatgttttcaggtaaagttccagcaaagcaactaaaaaggggcctatatagccaatcattccctgctgcattttatgcaataatcaggtcaagtatataagactaaaactcactttgcacacaaattagtcttactgtaatttctctttaatagataaaaaggggctagagaaagagaaattgtttcaaaggaaaagtgtaacatttgatactagattttagccctcaatttttttttgagtgcagattgaatcatgcattatttcttggctacaataatcctctggagagtaccagattataatttttcttcatatctttagttggtgccctaatggatggaataggttctttttttttttttttcagatggagttttgctcttgttgcccaggctggagtg[139 bp omitted]tttcaccatgttggccaggctggtcttgaactcctgacctcaagtgatccacctgcctcggcctcctgaagtgctggaattacagacgtgagccaccggcccacaaataccctttgattgtcaaaacattaatgttattatctctccttgttttactttcaaggaagcccaaatcatggtattctgaacaccagagatgtcaatctccctcatttgtcatctcactgggccggatctgtttttcactgcagatgccctgctgctaaaactatacaagcatcctccctctaggtccagtgactgtcatggaagaggcgggtgcgtgagattgtaagggccagttttgagggatagagttaggtcaaggtcagaccctccaaatcaaggaagggtacaaagatgcctaaacagctggtaaaacaagggactttgtcttctaagctattatgtatcacttttgcatccaccccaacaataaacaattttctgcttcatgtagaattaaaatatttactgacaggataaagatgccttgtgacaaagcctcctgggtataatattcccagttataagttgtaaagatatatatacatatatatatatatatatatatatatatatatatatatatatatataaatcttttacagagcaatgcttatgtttttgtatagctaattgctgtaagtctgtaattaaaaccaagtttacagtagctgaatacataggagttaaagacaagttagtttttgcctttttgtttgttagctttttacttaaaatagcaataataattttaaagagtaatgaatgcctgtccatgtccatttccatctggcctgtaacatttgattggctgtaagtctcctttttttttttttttttttaagacggagttttgctcttgtcacctaggctggagtgcaat[136 bp omitted]tttcaccatgttggccaggctggtctcgaactcctgaccttacgtggtccacccacctcggcctcccaaagtgctgggattacaggcgtgagccaccttgcccagccagctgtaagtcttttgactcttggtcccttatccatagggaatcccatcgagggacaagatggaccaggggcaggccgccatggcatcccagaaacactatgggacataatgaagatttgctggccattgatgttgcctctggcaattcttggccagaagtgggagaatgtaaaccaaaaataaaattctaagctcccctcatcccccacccccgcaccacaaccatctaaatgagcttcctccttggccagggcactcctaaaatttaacctgaaagactgattcaggccatgacaggaagtgggggtcgggcatgcctcattatactctccagtgttaacatcaacagagaccttaagcccaataagaatcatgtacattctattctctctgaagcctgctacctggaagctccatcctccgactccagttgtcccacctttctggaccaaaccaacgtatttcttaaatgtacttgattgaagtctcctgtcttgctgtaccccaaccatgttgggcacacattctcaggatctcctgagggctgtgtcatgggccatggttactcatatttggctcagaataaatctcttcaaatatttacagagtttaactctttccatggacatgggggagcacctgttggagacacagcatctcatcccccagacctgctgaatcagaatctgcatttcaagaagatccccaggcagttcgcaggcatgtgcacatttatgttgacaaaaagagtccaactctgtcaaatatttgaagagatctattctgagtcaaatatgagtgaccaatggcctgtgacacggccccaagagaccctgagaacatgtgcccaaggtgatcaggctatagcttggctttatacagcttagggagacataagacatcaatcaatacaagtaagatgtacattggtttggtccaggaaaatgggacaactggaagcatggggtgggggcgcttccaggtcataggtggattcaaatattttctgattggtaattggttgggagtttatttaaagacctggaatccacagaaggcatagaagggagtgtctggattaagataaggagtcatagagaccagcgttcctattatgcagatgaagcctctaggtagcaggcttcagagacaatagatggtaaatgtttcttatcagacttaaaaaagtgccagactcttagttaattctcacctgaatcaggcaaacaacctggaaagggaaggggattctctacagaatgtagattttccccacaagggacagttttgcagggctatttcaaaaatatgtcaaaaaatatattttagggtaaaatactttgatttctttcagggcctctctgacatgtggtacttacaccagagtgaggctggaatttggtatcctattgctaatctgttttgttagtcttaagatctctgttttaatgttactgctggtcagttgtgcctgaattccaaagggaggggagtgcaacgtggcgtgtccaatccccccttcccatcatggcctgaactagttttccaggtttctttggaatctccttggctgagacaggggctccattccatcagttgggggatttagaattttattttgggtttacaacagtaagcaaaatgctttcctgagttctgagagtcattctagtgagttatccaacttgaggggcgattgtggaacactaaaatttgtatagccaatcagtcagaagtgtgagtgacccctggaatttgcgcttgtatctgaagtgagagcagggtcttgtgggactgagcccttaacctgtgaggtctgtgctgtaaaccagaaataaaattctaagcccccacccatctgaatggacccctcctcttggccaaaggcgttccaaggttaacctgtaaaactagtttaggccatgatggaaagggggaattggacattagcactaacatagaccttaagctgataagcatttacaacctcttctctctgaagcctgctaaagtggaggcttcatctgcatgatgaaaccttggtctccacaaccccttacctaacccagacattcctttctactgattccagatctttagataataaccaattgccaatcaaaaaatctttgaatccacctgtgatctggaagcccctcccatctttctgaactcaaccattgtacatcttacatgtattgattgatgtcttatgtccccctaaaatgtataaaatcaagttataggccgaccaccttgggcccacgtcatcagggcctcccctgagactgtgccacaggcatgtccttaaccttggcaaaataaactccaaaattgagacttgtttcagatacttttggtttacagttctaactcaggagtgtcagaagtgaattaatttgtgaacacctagttggtgttggagaatttgttggtgttggaaaagatactgttaccggaaagaggtcccaatccaaaccccaaaagagggttcttggacctcgtgcaagaaagaattcagggtgagtccatagagtaaagtgaaagcaaatttattaagaaagtaaaggaataaaagagtggctgctccataggcagaacagccccaagggctgctggttggctatttttttcattatttcttgattatttgctaaacaaggggtggattattcatgagttttacgggaaaggggtcagcagttcctggaattgagggttcttccccttcttagatcatatagggtaacttcttgacattatgatggcatttgtaaagtgtcatggtgctggtgggagtgtcttttagcatgttaatgcattataattagcatatcatgagcagtgaggataactagaggtcacttctgttgccatcttagttttggtgggttttggcaggcttctttactgcaacctattttatcagcaaggtctttgtggcctataccttgtaccgacctcctgtctcactctgtgacttagaatgcctaacctcctgggaaagcagcccagcaggtctcagccttattttacccagctcctattcaagatggagtctctctgattcaaacgcctctgacaataccatgtatttggtgttaggaaaaaactctccagactcactcatccctgttctttggtggctaaggggagaaatgagtttgggtagctcctccccaagacccttaccagttatctgcattttaagaattctctggctgggtgcggtggctcgcagctgtaatcccagcactttgggaggccaaagcaggtggatcaactgaggtcaggagtttgagaccagcctggccaacatggtgaaactctgtctctactgataatataaaaattagccaggcatagtggtgcatgcctgtaatcccagctacctgggagactgaggcaggagaatagcttgaacctaggaggcggaggttgcagtgagccaagatcgtgccattgcactccagcctgggtgacataagtgaaactccatctccaaaaaaaaaaaaaaaggaattccctatagaagccagattcttcaatgattgagttgtggcttaatggtagcttgtcctggctccagcacttactagctgtgtgatcttgagtaagttacttattcttaatttcctcatctgtgcagtggggatgcctgccacacagattctttactcattttttactaaaatgtcttattctcaaagactttgtctacctacctccaagtaagaaaatccgatatgaaatcattattttatttcccccttctaagaattaatcagaaggatctagaacagcttaactgcctgaggcacctgtaggcagaaagcaagaaacttgttctgtattctgagagtttgctggaggtttgctcgagggccaaggtgtgcttctcccaggctgtcaagatattagtaataactccaggccctcactttcctatgtctcaactattatcctctcgagatctttgagtgtcttcaggctggtgaatctcatagcatgagagtgctgcatgttagagctagattcctaataaggaggtgacccatggtcaaatacacatttttctaaggaacttaattatccacattctattcaatgactgcagcaccccccactaccagtgagcatcaggagattaatttatttgacaaatatttgccaagtacctacaaggcattgctctccataagcctcacttcctgtggctttgctgagtttctaaggtatctctggctttgtggttctggggttgaaccacatgtgaggtgagggttgggcatggtggcaccatcctgggcaacaaaggaagactccatctcttaaaagacatctagggtgatggaggagtaggggaactgaggtcctctgctcagtccttgggctactttctaaattacacattctgattgccctctgctcctgcagtgcccacagccttcctccctccttccatcttcatgggctgaggccattccattcatgggctgaggccattccagaaggaaggtgaaggaagtgatgggggttgaagggagaggccctgggagcctgcaatagctgcaactggaaggaattgtaatcgcccaatgggttcaccttgcccactgcctagacagagctgatttctcaagacaggggaattgcaatggagaaagagtaattcatgcagagccagctgtgtgggagactggagttttatgattgctcaaatcagtctccccaagtatcccgggattggaatttttaaagataatttggtgggtaggggctcgggaagtggagagtgctgattggtcaggttggagatggaatcacaggggaattgaagtgaggttttcttgctgtcttctgttcctgggtgggattgcagaactggttgagccagattactggtctgggtggtgtcagctgatccatcaagtgcagggtctgcaaaatatctcaagcgctgatcttaggttttacaatagtgatgttatcaccaggagcaatttggggaggttcaaactcttgctgcatgattcctaaactgtaatttctaattttgtagctaattaaggcagactgttacccaggtaagaaggaggtatgttttggaaagggctagtgtcaattttgtttcagtcaaaccataaactaaattccttcctaaggttagttctgcctacacccaggaatgaacaaggacagcttaaagggtagaggcaagatagagttggttaggtctgatctctttcagtgtcataatttcctcagttataattttcacaaaggcagtttcagaatcatgccataagtcctccacattccccaagtacctggcttgtgccgatcccttagtccacttttctaccctcttctcttccagtcccaatccaactgtgctacaaagctcatatccaggtccaacccctgagaaacttctctcgatcccctagttggaaaaaatcattccctcttctgacctcccatgtcgagaccatttataacatgttagaactcgattcctaacaaggaggtgcccgatgatcaaatacacttttttccagggaacttaattatcctcattctattcaatgactgcagcaccatccccaccatcaatgagcatgagcagattaattcatttgacaaatatttgccaagtacctacaaggcatcgttctccatgagcacatagctgtaaacaaaacacagcagcaaaggaccctaccctctaggtgaggcaggcaatagaaaaataaggagataatatgtgagtcatgacaagcattttgaagacaaaatagtggaaggggataaggagtaatgggggtaaaggaggtgctgctcttttatgtagaccggtcaaagagcagaacctgtagaaagtaagtgagcatcgtgaccagctgggagaagagcaatgcaggaagaagacgcggttagtgcaaaggccccaggaagactgtgcctgatgtgtttgagcagcagcgatgaggccagtgtggctggggctgagtgggtggggtgggagagtgtaagatgatatggtcagagaggctgtgggggcaagccttgtaggactgtataaaaacttaggctttgtaagagagatgggaaatcacaggaacatcatgatctgattcaaattgtcacaggatccctctggctgcagtgtggagagtggcctgtaggggaccaagggtggagacagagggccagtgagtaggctactgcaccagtccaggcaaacactgaagacctgtgtatatgtgttgttccctcggtctgtctcaggtctgttgaatagtaagaatgctttgctctgttgaagatgattccgttctttacataagtaattaaatgtctttcctttgctgtttcctgatacctaaatgcagtaatatatgctcatgatagaaaacttagaaaataaagaaaagcattaaacaataaagatttccaactcctacaactcaaagaaaacagataaatcatcctactttagaggactaaatgtacaggaactcattgatttgctcatcaaaaggtgaagagggaagagtagcagccccaggtagagctacccagcaggcgaggctgccctcaggaaccacagccttccctttcctaatgatttctactctgtggcacccacacttccctcctcagggctctggtgttatcctccttctgggtctccatcatatctgctctcagcaaaagatccagctcattcatccagccccaagggacagggcttcacctccggacaagggtgagatgaatgaggtcttggacacagaatttaagaagtcaaaaacctcagccatcaagataaatcatattaaaatgcaatggtttaaaaaattaaaattaattttaaaagtccatgaacaaaatataaacatttaaaataaagacagggtccaaccttgcacctgcacagtcctgccttgctctctgcaccctaacccagccctgctcagcccaagagctttgaatctgaatacaaatcattccagacttcaagatcaagttaaagtgttaatcgtctaccagaatgtgatttctagctttaaaaagaaaaccaagaaaacaacttccacatcaatgcaaaggttttctcatttcaccaggtttttgttttccgtctgtttacctgatggtttactaaagaggtgaagaagtctgtggctgaatgaacacattgaataattgcagagacttaaattctcaaatattcataaaaatattttaccttttttttttttgagatgaagtctcactctgttgcccaggctgtagtgcagtagcatgatctcggctcactgcaacctccgcctccttcaattctcctgcctcagcctcctgagtagctgggactacagacacatgccaccatacctggttaatttttgtatttttagtagaggcagggtttctccatgttggtcaggctggtctcgaactcctgacctcaggtgatccacccacctcggcctcccaaagtgttcggattacaggtgtgagtcaccatgcttggccatgccggttgtttctgctgcttgctgtgtagaccgctgtgatgaccatcttcttattgaccctcctttgtctctggagccccgccacctgccttctacctggagccttccttccaggtccttcttcaacatcagctccaggatctgcaagatctttggatatggccgctgcagaaggaaggagaaccacttcctggagaagcaggagtgagccaggatctgccacacaagagagccgggaacccagggcatgggttaaggcgaggagcaggtccggagggaagatctgaggcaaagaggtagagttcacaggtcctacacccctcgcacctacacagtgtccctcctctgatgctgaggctctctctgccttccgaggagaaagtggcgacgtgtcctgtgaaaccgcagacttaacacatcttccaaaagccagcttggcaggaggtcactgctagaagcacctctgaaataatctgagccgtcttacctgttcccctttttcagatgggaacactgaggcagccaccctgcagagtgagtctgcagtgctcctgagccacccccctccaggcttggcaaactcactgccttcttgtctgttgccttgactgcagggaggaccagaggtgctcatttctgggagggtctaggatctgccagctgcacagtgtccaagtcaagggcttcagcaacgacaattaacaaattcctttctctttgcagagagcctgtcacctgtgctgccttgagatgctgacatctgaggatgccccagacagggcctgtggctgctttctgaaatagtgcagcaccttctctgcttcctcctcaaccttctccttcacagcagaaccctgcctccttcctctccccacaggcttgtttcagcattgatttgatcaactgagcaccacgagaacacaaaccacattcctttgttttttcatcacgttacccccagcacttaggacagtgcctggcacaaaggaggtagtctgtaaatatttgcgtaatgaatgaataaaggagggcatgagtacatctcctctgcccagcacggatgacaggctgagggtttgaatccaggactctctcaccgtagccctcattctcactgcatcctcaccttcgtcctccaccccccacccccccactgggttccttggggatggcaggggtggagttcctggcatccagttctgagcatcagctctgccaagtagtggtggcgggggggttttcatgaaagaatccccctcgctccctgtgatgttggacatttttccttgtctgtgtagtttcaggctttgtctctctggccttatacaatatttaaaaacattcattttccagttaaacaaactggattggatactgttgtttgcaactaagaaccttaatattgggtgatcttcccaatattttgcagaacagcagcatcaccgcttttcctgccatcagactgggccctaccagttgtaagaagaaaacccattgcaacacctacctcttaatggccactccaagctacacaaaaacctgagtgatgtttcaacattaaagccttttctttttttttttttttttttacttttgggccaggtcagattgaggggtaggttgttctcctggtctctctgaaggagaagggaaggagcatgagggtcaattgtctgcttatctaagaaatccccttccctgaagttgtgtgtgtgtgtgtgtatctctgtatgtgtgttgtagggtggtggtggtggtttgttatttcagttacagcaataacaactacccatttagtggacaccgaccatgtaccaggctccatgcttagccttttacacgcattatttcatttaattcccaagaatcctgtgaaggagggtgcattatggtccccagtttacagagggggatatggaggcacggtgatgtcacgtaactgccatattgttttcctggggcaactagaacaaaggactacagactgactggtttaaacaactgcaatttaccctcttaaattctggaggccagaagtgtgagatcagggtgtccacagggctgcgtttgctctgaagaagctggggaaggatctgttccaggcctctctcctggcttctggaagctccttgacttgtggtcacataaatccagtcttcacatagtgttctcccgtctgtcccctttttaaggacaccagttgtattggattagggcccacactgatgacctcatcttaacttgattacctttgtaaagagcccatctccaaataaggtcacatttggagggacctgggggttacgactccaagtagcttttttgggaggacacagttcaacccataacagctgataaatggcagaacccaggcatatgtgacagacccaaaggctttgtcctttgggaggaagattgtgtaaattagagcccagactttccagccaggctataaaagtcctaattctgggtttgtctgaatttgggaatttggggatctaagaagcagcttattaggtaaggtgggcgtgggggtgagaaagggtgaggcatcaagccccccatcactgtttgtgactgagcttaatcccattgggaatgctgggagcagggccagacaattcctcgcagcagctatcaccccctttccctaggagagcaagtgtttatgcaccagtggagatattcaggcaccagtctccatatggactgagggtttccggctgatctgggcctgggccctccttgtgtggcttccaaggaagccctcaggcaaagagatgcagacactagcacttggaaatcagctggtggcaccgaaggagtcaggtccggggtaagggtagggcacatatcttctgccacactctgtatgtggctttgaacaagtgatttaacttgtaggtgtgctctgtacctgtcttctccctgtgtggggttgttgtgtagctaagtgaattaacacatgctgagcccttggaccatgtaatgactgcaacttaaacattaactatgattattattgactaaatgatactgccccctactggaaaatgtgtgacccggacatcacttagaaactagtgctggatggcatttgggagggaatctgatccaacttcctcatttcacagatgaggaattcagacctaagaaagggaagtatgttgcccaatgtcacacagctaacatatataatcattataatagacaacccaggcagcctcattcacttgttcattcattcactctcatgtgtgtgtatatatgtatataattatatacatatataaaacagacatgtatatagcatatattatgtgtatataatatacatattttatatatttatacatattatttctattaatatataattacatatacacatgtgtatatgcacatatgtatataattatatacatatgcatataatatatattatacatgcacatacacatgtatataattatatacatatatatgcatatatacacacacatatgtatcactagtgtttgtaagtgatatccgggtcactcattttccagtagggaatagtataattatatacatatatgtgcacatatatacataatacatatgtttttagagactgggtattgctctgtcacccaggctggagtgcagtggtgcaatcattgctcattgtaacctcgaactcctggcctcaagcaatcctcctgtctcagcttccccagtagctggaactacagatatgtgccaccatgctcagctaattttttaactttttgtagaaacagggtctctccatgctgctcaggctggtttggaactcctggcctcgagcaatcctctggcctcggcctcccaaagtgctgggattacaggcgtgagccaccacgccaggcctcactcctaaatattaagcacctgttttgtgataggcaccaggaaaacagtaatgaccaaaacggtagcctccaaatttgtttgatccctcacaccacccatttcagtaaaaggtttttttgtttgtttgtttgtttgttttgttttggagatgggggtctcactctgtcacccaggctggagtgcagtggtgtgatctcagctcactgcaacctccgtctcccaggttcaagcgattctcctgcccagcctcccgagtagctgggattacaggcgtctgcctggctaatttttgtatttttagtagagacagggtttcaccacgttggccaggctggtctcgaactccggaccccaagtaatcttcccgccttggcctcccaaagttttgggattataggcatgagccactgtgcccggcccaggaaaaggtttttgagtgtgcagttcccgtatttataagtatgtgcatattgttgtactaatatgtacattataagtattcaataatataaattttaataaagtataggctagaaatgaataaactgaagtttctaaatattttctttctgtaccacagtgcaccccacttaggagttggctggaccagaacaggggagacagaggaatagtttcagcagcacaaacgctgcgagaacccaggtggaggcccttaatctcacctgaagaggtcaaggctggcgtcgcagaggaggcagcgctcatcctggattttgaaggatgaactgaattttatcaggtagaaagaaagaggaaaacataagcttttgggtgtggcaaagatgtgggcattagaaaaaggattctaatttcctttacctcccgcctctccgaaaggagtatttgtattggtttccaagtagctgttctgcatcataggagaccccagcttattcctcaaagttcacccaaccctgaatataggtgaacctggagtgccgtcagtgggtagaaggggaagaggagtaacctaggagagatgggggaaccacctcatttgcatgagagtcgtgcccttctcccctgtagcctgagtttcctgcttccctctgctccacccagctcatcaggagagagcccactacctttcttacctctaagaagcagacccatggggggagtggcataggtgtgtgcatgttgggatgggagagggatttggtgctggaagaagaaaagttgggaaaggcttctgaataatgaaaacccagaatttcatagaagtcagctcattagtcagccttagctttcgtactttctccaatgggaagctcacctcctcttggcaccaggttccagctgatagcactcattattagaagagcactcttgtttcccattaaaccagcatatgggccaggcatggtggttcatgcctataatcccagcactgaggcaggtggattgcttgaacccaggagttcaagagcagcctgggcaacatgttgaaaccctatctctacaaaaaatacaaaaatcagctgggcgtggtggcatgcacctgtagtcccagctgctcagaggctgaggtaggaggatcacctgattctgggaggtgacgattgcagtgagctgtgattgtgccactgtactccagcctgagcgacagagtaaaaccctgtctcaaaaaaagaaaaaaaaagaaacaaatatgtgtcccctttgcccctggcccttcatttccacatgggtcctgactactctcaagaagcccactaaccaggtcagctgtctttgtactaagacagttctgcagagattgagaaatggtaatcaaagtacttccacctcccacaaagtgtatttttggttcttgtgcaacattttgctaagtcccctccaggagctttcagtctcttaggattcatagttaagagaatctctttttaaagctccctacaatatctgcagaggctgccagatggtagccccccttgtgaggtgcccctcactggggatggggagagaggcaactgtaggaagaggagggtgctcagtagggtaagagctcctgagtcaccccctgccttgcctcccccagttaagcaagagctgtggcaatgtaattcagaaatagaaaagaggatggctgagaggagggggtaggaggtaggtggtgggcaggggtccaaggctcatgaaggtatttctgaggatgcaccactcttcaagttcattattagaccttctagctgcaaggcatcatgggaacaatctgtttggaatccagtgggttcccagccaaagagacgttctcgccagctcctccaggcagagctcctttgacaatgcattcacacacctgcctccgagaagatgggggctggagggacctttggagagcaaagtctaactgccttgctgcagatgagaaaaccgaggcatagagtgctggaatagcagggattgttaaacaagtgaggacatagactgggcgttagatacagctagttctcactcactgccttgtggtcttgcatacgtttctcaacttctctgaacttcagttttcttattgataaaatatggatgatgacaatacctgtcaatatctccagccagagaccactaggaatacccctcttcctagctgaactagaagtcgaacaatgtgcgtttattactcactaaggcaaaggagaatacagacctgggtgatcacacagtgacatctcattaagaggatgttagaaaggacttctaggactcaggcttgtgttcgttgatttggaggacggtttaaagaagcaggctttgctctgcatcggatgctcaggaaatgcagcagttctatgactgggtatcttaatacatcttagctgtaagaagggatgactggatggagattagagctgtaagaagagcagcagttggtaaagaagcagccgatgttcatattagccaggggagagggctgcttggttatttttgtggcttgctcatgttttgtctgtgttcaaacatggttacagcttaggcagttttggttttgatctgtcatgggcagagcatggccttgtctgacattgatgttttgcaaagttgttcatgttcagcaggagaacatcaaggccccgctgagtgtcaggacagctcctggaagtcaggtctgctcttttctcttctccttttcttttcttttcttttttcttttcttttcttttcttttttcttttcttttcttttcttttcttttctctctctctctctctctctttctttcaatacagggtcttgctctgtcacccaggctggagtgcaatggcgcgatctcaactcactgtcacctccacctcctgggttcaagcgattctcatgccttagtctcctgagtagctgggattataggtgcatgccactgagcctggctaatttttgtatttttagtagagacagggttttaccatgttggccaggctgatcttgacctcctgacctcaggttcaggtgatctgcctgctttgggctcccaaagtgctgggattacaggcgtgagtcagcctctgctttttttctcatgttgatctcacagaatcatagtgataattaaatgctatgatatttgtgaaattccttgtacaagtacctggcagaataacttctcgataaataatgcttggatgataaaagtaatagtaataatattcattagtaataataatcaataagtttataatggaaaagagcttggtacttatttattttttattttattttattttattttttttgagacggagtctcgctctgtcgcccaggctggaatgcagtggccagatctcagctcactgcaagctccgcctcccgggttcacgccattctcctgcctcagcctccctagtagctgggactataggcgcccgccaccacgcccggataattttttgtatttttagtagagacagggtttcaccatgttagccaggatggtctcgatctcctgaccttgtgatccgcctgcctcggcctcccaaagtgctgggattacaggcgcgagccaaggagcttggtactaattagaggggttcggctttagtagctattaccatgtgactgtttagtagatattactgtgtgaccataagcaagtcacttcacttttctgagccagtttccttctccgtaaaataggggaaaaagcttgatgcggtggctcatgcctgtaatcccagcactttgggaggccaaggcgggtggatcccttgaggccaggagttccagaccagcgtgaccaacatagcaaaaccccatctctgcgggatatctaggcaaagatgttgagtagacactgatttatccatgcactcgttcagcacacgtttcttagaaagggtattcggtgattgaaagtgcagaccagactccatggattcaaatctgactctgccaatttactggttgtgtgcgcaagtcacttcacttctctgtcattattgatgcatctgtaaaatggggttggtaataacagctcctgcctctttggttgttactgagggaggggaggttaatacacgtatagactttggaatagtgcctgcactcaggaaggactcaatagccatgctatgattgagtgccgactgtatgtgctgggcactgttctaggtgctgggtcacaagagtgaaggcagcacacaagctccccaccctcctggagctgacatttcagctggagagaataataattgagtgagataagtttcaggtggtgataactgctatgaagaaaagaactcagggagggagggatagccctgggaaaaatacctaatgtaaatgacgggttgatgggtgtagtgggccagcagggcacatgtatagctacgtaatgagcctgcacgttgtgcacacgtaccttagaacttaaagtataataataaaaaaaaaaaagaaaataactcagaatacaaggtgaagaggggccagtttaggcaggatggttctgagtggagtgaaggaaggagccgtgtaggcctctggtggatgcagaagaaagaatgaatgcaaaagtcctaaggcaggaacaaactcttcctgcatggcagaaaaagataggcaggggcttgatcacagccatgacaaggtatttagattgtaattccatgtacagtggaaaccacagaagggcttggaacacgaaagtaacgtgatctgatttaatttttaaaaggtcaccagctgccatgaagagaacataacacaccaacaatggagagaggtctggaatggatagagatctgaggtttttcacccagttggaaaatggtacagcaggagtggctgacatggcccaggggttgtatatagaatcacaatgataggaaaagggcagttctgctcttgccttaccgcgtgatcctggagagtgtcacctgtccctcaggttctcgtttacaacagaaggtggcgccacgtgtgataattcaagcatcccttttaacactcatgtaatcatgtaatgcagccaataaacactgccacaaggatctgttttacagttatgctccttagaagcatttatgaagcatttcacacgaattcttctagtacttgctgggaatgtccctgcaggtcctgtgctatgctgcctgaacttgggatgccaattcagccactgttttctcctctgtaaggtggggatgacaaaatctgctctgcccacttctcaggaatgcatgaagtatgacattagagaaagcctggcgaagaagtttttgttttttgagagggcagcatggagaaggggtttctttcttttcttttcttttcttttttttagttactttacatcatggactttttttttttttttttttttttttgagtcaagagtctcgttccatcactcaggctggagcgcagtagcatgatcatagttcactgcagcctcgaccttctgggctcaagcatcctcccacctcagcctcctgagtagctgaaactactggcacatactaccatgcctggctaatttttaaaaactttttggagagacaagttatgttgcccaggctggtctcgaactcctggactcaagcgatcctccacctcggccccttggctgattcttttggaactttcttccttgtgtgtaaatttaggtgtgttacctaaattgttactatttgatttttcagatttaagacttaccactatggaaaacgaggacttggctttcttttccacctgcctccatgacttttacaaaccctttctatgactcatcctcccagtggcgttatactataatgttaatccgatcaatattcgatattcaggtttaaatccaggttctcattcctggacttttccccatacctgttgagacgacactacatacggcttccttcaaaaactagaagcatctgggaaatggagaattctagcattgcttctccttcttagggagatggtgttatggataacagagagttaatagcacaagctttggtgtcagaaggactagagtgtaattcctggctttgctggtcatgcctgcaagactcaagccaattgctttctctgccaactttggtttcttcacctataaagaggtgtgaggttgtggctgggcacggtggctcatatctgtaatcccagaactttgggaggtcaagccgggcggatcacctaaggtcaagagttcgagaccagcctgatcaatatggtgaaaccccatctctactaaaaaactacaaaaattagccaggtgtggtggtgtgcgcttgtagtcccagctatttgggaggctgagacaggagaattgcttgaaccccggaggtggaggttgcagtgagccaagattgtaccactgtaccccaggctgggtgacagaacaagactctgtctcaaaaaaaaaaaaaaaaaaagaggtgtgaggttgcatgtaagcttcttaggtacatgcctgaaacatagtaatcaattaaaatgagcttttatattccgcccacatcctgcaaagaaaataacttctattgagagattactcagttggcacataataccgccttatttcttcttccaccacactccctccattttcccatgctacagaggaaaacaaggcattcagagtgtctcagcgacctgctgaggtcacacagcaacaagagtaggggagcagtgctgtgcacctgtgatcccagctactcaggaagctgaggtgggaagatcccttgagcccaggaggcagaggttgcagtgagctgagattgtgccactgcactccagcctgggtgacagagcaagagcctgtctcacaaaggaaaaaaaagagtaggggcaggattcccactgaggatctgctcatctgacttctggaacaaagaagtggacaatgaaagaagtggagctcaaggcccctgccttatggcccagaaactctttcttggactgggctggggactggcgtgtcctagctggctgcacctcacagggcacacatgggggagactcagcatctggaaagtagggtgttactccctactcctcttaccttgagctagctctccagtgggtttcgagcttcagtgcacaatacatacatgatctgaaaagcctcaagctgcaaatctggtttaaagaggtcctgtgtgagttgtgtctccagaaacttggcagaaatgaagtctttctggaggaatctacctttgagtcctcaaagaattcccacaagataaagttctaaggcacgagagctcacagtcaaaaattacaaaataaaagggaagcaaggcctggtgagagtcaactgaaatgacagaggatgcaacaaaacccacacagcctaagatttccaaggatagaaaaacaagaatatcaaacaagtgtattaaatatattgttcggggatgaacacatatgtggttaaactgtaaagcaaagcaaagaactgataagtatacattttaagttgtttgctctgagggggaaggaaagagaaatgacattataggaacacagaaggattcacagatcatattaatatcctgacagcaagcgctcatacatccaccacccacattaatttcacaagtgtttgctgtgttgttattctttgtattttcaacatgtcttataaatattattttgctgtctgtggtttcataaacacaataaaaatatagcttggggctggttcattctgattgcttgcatgagtgagtccaccttctccctaaccaccggacttcttatgttgggtaaatatatggttgcaaaattttttcctcctttttctaagctgggtggagaatgtcttccccacatgtttccagtaaattcagatgttgctttctctgcccatagtttccttaggcagagggaataaatccccctgctggctgtctagaacacttttttaaaaaccaatctcttatcagaactgcctgtttccttgtccgtctcccctgctgggccactgggcctcaagcgatcctcccgcctcagcctcccaaactgctgggattacagtcacaagccagtgcacccagtcccagattttgtttttctaatacagttccgctagttctattaatagctaaaatgtaaacactgaaaactcttttgaaactaaagaggggaaaaacaagtaaaagaggtttttaaaaattaaactaccatggaaactggtttacccacaattttggttcacaaccttcattggattacctattggggaaaacaaagtttagccatgtaaacaggttccaacttgccaaaaatataatttgggttcaaccatcttttgtaaactggtaagtttgtgttgctgtctcatggctagagttccaaggtaaaaaagataggacctttgtgcatgtactcatgtgtttaactgaaggttcttacctaggtgaacaggctattaaaatagttaacaaggaaataacttgaaatgatgactagatttgtctaatatctcagttctcatagtcatctagataaactcctaaaaataaatagggtaaatataaatgggataaatgcttgaaggtaaactttttgtttagtttaaaaatctgacaattatttaaaatgctcattggacatctgggtgatgtccaattaagaaagggttatgatatggggaaacatttctaagaattgtggagtcgttctcatttataatgctgctatctgagtacaaagccctagttgataactctttccttcaactttaatgtcagctcctgtaattattttttccctccagttctagccactgttgcagcctgatgctaaaacattttatttcaaaggtctagaaaatcaatgattttctccaggataacttgattctgtactcagactcagttcagcattgcttgcatcccagttttttgctaaaatttaaggttactaagaataaaaattctagctaatatataatcttttttttttcagagcaagtgtggaaatttatttttaaaggctttagaacagtaaagaaaggaaaatacacttggaagagccctgagtgggcaccaaggtcaagtgcctataattttatatataaaaaatgtgccaaagatgatgtgcctttttttcccccaagttggagtcttgctctgtcatgcagtctggagtggagaggcacgatctcagctcactgcaacttctgactcccaggttcaagagattctcctgtctcggcctcctgagtagctgggattacaggtgcccaccaccacacctggctaatttttatatttttagtaaagatgaggtttcactatgttggcctctgtttggcagtgtatgggtatgcagtgggtactcacaaatgctggttagacacctgcaggcttgtactaaggaccaggtttggcaaacatcagtgtttgagggagtctgatttgagagtgtggaagttgagaatcatggcaggagatggactctgctattcactactatgaatcaaccttggtccctgttcttgggggagaccacaggccaatggaaaaaacagagatgtaactaattgctggtagcgttatgagtaactctgttgggtaagccatttggtaggaggcagagaactggaggcaagacctatgtacttgcagagaacattgttagcaggactggcctaagggcacctttctcccttcattcatcagaaaggatcaaagctgctgctaggagaggaaaagggagctgggccagccctggctgtaaccctttacaagaaataaagctgtgaaagaacctgtggaatcattttcagctcagaacacagagcaatatttttactctctcttacgggtggaattgtgtcccctcaaattcatatgttgaaatccagtaccttggaatgtggccttatttggagatagagtctacataagcaatcaagttgaaatgaggttatagggtgatccctaatcaaatataactgacacactcagagagactattttattttatgtattttaaaaattttttaatttaaatcgtttttggggagcaggggtttttttgttacatggataagttctttggtggtaatttctgagattttttggcgcacccatcacccgagcagtgtacactgtacccaatgtgtagtcttttgtccctcatccccttgccccttccccccaagtccctgagtccattatatcattcttatgcttttgtattatcttagcttagctcccacttataagtaagaacatacgatatttggttttccatccctaaattacttcacttagaataatagtctctaactccatccgggttgctgcaaatgccattattttgttcctttttctggctgagtcgtattccattgtgtatatatgccacatattttctttatccactcattggtcaatgggcatttaggctggttccatactttcgcaattgctaattgtgctgccttaaatgtgtgtgtccaagtgtcttagaaaaagagaaaatttaaagagacacacatataggtagaaaattgtgggaagatgaaggcagaaaccggggtgatgctcctacaagctaaggaacagcaaggattgccagaaaaacttccagaagctaagggaggggcatggaacagattcttcatcacaaccctcagaatgcacccaccctgctgacactctaatcttggacttctgaccccccaaactgtgagagaataaatttctgttgtttaagccacccagttggtggtattttgttacagaaatcctaggattgctttgcaaaatattctctcttaatctatgttgagctaatgaggcaagaaatatcttcatattgtaaatttaaaaactgaggctcagagaggtgaaataactgcccagggtctcagaactaggaagtgatagaattgggactcaaatgatctcttcttgactccaaatctcaggctcttaccagttcttatgggatgggtagtaggggcaatttgacaaataatgaaactacttgcttgtttcttcttcaattctgttacagattgatttctgtgggttaacctcagtaatttacagcctgttctaattctgtatagtccccccacgggtccaacagggttataaagaacctcaccaacaatcttcgcctgctccagttacctattgctgcatgacagcaaaccatcctaaagctggtgtaaaatagaatcatttcattagactcatggattctatgggtcagaattttaaacaggacacaaacatgagaatggttcatttctgttccatgatgcctcaggcctcagccgggaagactcaaacagctgggggtgacgcgatgactgggagctggaatcagctggtgccttcttcattcacatggctagcacctgggctggcatgactgaaagcctgggctcagctgggattgctaactgtagcgcctacatgtggcctctctatgtgccttgggcttccttacaacaaggcagtctcaggatagtcaggcttcttccatggcagctcagggctccaagagctagtgttccagttaaaagggtagaaattgcaccatcatttatgatctagccttggaaaccatatagcattacatctactagactctcttggttgaagcaatcacagaccaactcagattcaaggaatgagatacaaaccccacttctctataggaaggtgatatggtttagctttgtgtctctatccaaatctcatcttgaattgtaatccccaggtgttaagggaggaacatgttgggaagtgatttaatcatgggggtggtttcccccatgctgttctcatgatagcgagtgagttctcacgagatctgatgtttttataagtatttggaagttcttccttcgttcactcttctctttcctgctgccttgtgaagaaggtgtctgattccccttctgtcgtgattgtaagtttccatgattgtaagtttctgctatgattataagtttcctccccagccatgaagaaccatgagtcaattaaacctatgtctccataaattatgcagtctcaggtatttatagcagtgtgagaagtgacgaatatagaggggtataaaacaactgttgacatgtttaaaaactgctacaacactcttggcctcagggtaggaaaatctcatgggtctcatgcttccctttgggatgaatatggctttcatggcagttgtgggtacccatcctttccatcctaggaaggaccagaaaaattgggttgtcatcctgctagtagacgaattagtaaccatggaaatgagtccaagctcatactactcactgcatgacattcaataagttgagagacaaggtattggggtactgaaggcaactttatttcagaaagccaacaaactgagaagatggtgaactaatgtcctaaagaaacatcctaagttaatagaattgtaggctctttttatgttgggaaggggaagagaaaggggtttgagatcaagaggtgatcaaggatcacagacatctgggtggcagtgagggtccaagggggtgtggtgaaacttctttgtccttggtcaggtcacaatgctcctataaatcatctttaacacaatattgttacttgtgtatacaccctccttatctcctctggggttaatttggggaagggactattagcaaccttgctttaaactataaactaaatttctcccatagttagctcagcctatgtgtagaaatgagcaaaagcagttaacctaaaatatgtcaccacaggagtggggtaggagtttggggcaaaatagagctagtttttgctaagcctccttttttactgctacaacctcacagcttctccctgtgactttatcttagggtggaaagtctaataaatcagacctgtctcccgatgtgatggactgaccagtacccagtaattcatgatcttttgcctaataaaaggaaccactactatcaatgctttgctaagacaactgcaaaaatcctcttactactagtccagtttccatagctgtcctcttacaatgcattcttcagagctgccagagggattttcaaaaattataaatcagatgattttgtcccccaatctcccagcttttactagcccatggcttcccattgcacataaaagatatgttgcttttcatagccttcagggtccttcatgatcttgttcttgcctagctctttgatttcatctcccttgattttaactctgctccagctatactggttctcttactcttcttggcattcatcaggcttcttcctgccttaggatctttggacttgctttaaccttttttggtaatgctcagccccagatgatgttgtagatagatgttacacatcattcaagtctcagctgttgataaagaagactcttggggtgagcttgatcaaggaatgtttgatgagacaatgagcccagggaaggtttgtgcagcatgaagtaagtaatgtagctggaaataaaagttggtatcagtcaaaaaggcaggctaaggagttcagcctttatcctgaaggcagtgaagatccagtagaatttacagtcaaggaattaactcgacaagtgcactgttctaggaagattatttggtttagggctggacctgagccacttcaaatagacaagctctgcttttcatgggtttttgtgcagagaccatgtgtattttttttttttaatgaggatttggtttgaacattattgcatgtatgccacaaggatcttaactgtgagttagaagagaatgagagctgagagaagtccactggatttggaaatgaggaacttggtggttacactggtatagggagtaagatctctttggttactagcaacagaaaccaactctggctgttgtaaacagagaagaaatttataaaaatgggatgtagtcggcatccattctcctttcctaataatatctctaagttagccagagttgaattttactgcttgcacccaatagcactaattgattcagtttagctctcagaactgaaggaaaggctaaaagaacacagcttggaaagaatggtaaagtcagaactgagttcttcccaggacacctctgagttagctccataaattttcaggtcttttatcattcattgctcaagattacagttctaggaacagtatttgattggccactctgcctgggggtagggcagacacattaattgacagtctccctggccccacctgtcttggtctggaggaagttatttcctccaaagcaaactcagggtgatttatcagaaaaaggacaaatgaatgctaggtgacaaaacaaaatagtcaatatatccaaagagagaggtttccatggaatgaaaggaagtttgactgagtccaaaagtctaaaaggagaggcccattgcatggttaaaggcaccttttttgttcctggaaacttcttaaatcttcaccgttaacttgtttacagtcattttagagtgggcatgtctacagctaattgacatcatctaccactataaacttttccttctttcctttctgcttcttttcttcctcctcttccctgatatatatttttttacactcatgaagtcaagtccaaaactttggatgcatcatctacgttaacctcagatagatctgtgtgaatgtgtataatattgaaataactgggacaacacaagtaatttggcaagagtcttccctctgatttactggctgtgtttcctccagcaagtcactttgcttagctgaatctcagtttcttaacgtgtaaaatgggagtaataatacttaatccataagattgctaaatacatataagctatctttcaccaaacacttactatgtgcccactccagaggtcacaaatttaaatgtcctcctggggtcaggtgagcactgtgaatggaactagttgcagagagggaggatggtggtggtggggattatgggaaactggagggaatgcttccctcatagaaaaagagtagctgtacttaggttctggttttcaaagtatggtccctagccctgcagcattggcatcacctggaaacctgttagaaatgcaaattctcaggttccagacctactaatcaaaactctggggatggggatcctgcaatctgtattttaataagccttccaagtgattctgatgcatgcttaggctgggcactgtggctcacacctgtaatcccagcactttgagaggccaaggcgggcagatcacctgaggtcaggagttcgagaccaacctggccaacatggtgaaaccccgtccctactaaaaatacaaaaattagccgggtgtagtggcgcctgtaatcgcagctacttgggagactgaggcaggagaatcgcttgaacccaggaggcaggggaagggaagggaaggggaggagatgggaggggaggggaggggagggaagcctgggggacagagcaaaactcagtctcaaaaaaacaaaaacaacaaaaaaaatgattctgacgcatgctcaattttgagacctgctgctctagctgatggttgttatatctaagattgcaggactgtgttgccagatcttttactttttccaagagaagctagaggtttatttttatatgaaattcgctacttttaaatcttggcaactaatttaaaaatttaaaacatactgtgtagttaataatgtatgtgctctagccagatttgcaacctctgatttatgctttttcctttaacccttataataatcttataaaacccttataataatcatccaagactgttaggatgatacacagtttatgcaggaagaagatgcaggcccaaaacatgaagtgtttctctaagtcacatagccagaaagtggccatggatgcattgtccctgattgggcatggatgcatttggttctaaagcctctgcccttttaaatgatgtaaagagaatatctataactatacctagcacggaacttggcaccacaaaagctaaacatctgatgccattgactgatgaaaattccttccccatccttctgcctggccctgccactctccctcagtctgtattcctgtaagagagagccaatcaatagggtgctcataagggcctgggaggagcaaggctgggcagtttcctggcccagggagctgaatagggcccggaagaaagctgttggcagcagtgcctggggctgaatgtacagtagccagctgggtccacgggctaaaaactggctgctcaccccagtgttctctttgtgccctagactgggtttcactagcctgttatgggctgtgttcccacctggctcctgccctcattgttgactgagctcagagtaaatagccctggcccctcccaataacgtccccagtccccaagttgagcatgagaagctgggggaggtgttctcagcatccattttggggacagtggccagatgtactcacatcaccaaaccctactcacctgtcactatcatcccagtgttcactgccccagggcccctctagcctccagcagcaaagacctcctggggcttctagaacctcagatcattggagcaggaagcacttcttgtctaactccctgggtaactctgttttggcacttaaccccctggattctaaagcttcatttatacttattggtctccttcgtcacaggagacacttatctgtggagcactcatggccatgtatccagtacctatcatgggtcaggcctggagtccctgtgtcaatcagtgtggatctactctcaatgctcccagtgagtacatggttgttccgtggcaggaacgttgcatttgtgttctcactgaagtcccatataggtgtcattttcactgatgatgtggcagctcagatccaggaaaggattcattccagggccctcaggtgggaagtggtggaggtgggagtcagaccccagaccctgtcaccccttcaagaccagtgctggagggccccttttgacgactttctcttcaccaagcgtcttgccctgcatatgtcacacagtaggcacccagtgaatatttacgacggaatggaaaaaacaagggcctggagggagagacctgggttcaaaaccttatttgtacagctttgcaggggaccttgtggtggaggtgcggtcctaaatccctaaacactcagttcctttgtcatatacagctgataacagtaactccccggtcagaggaccggcgacaattccttgagacaaggagcacagagcctggcacagtcagccctgatcaggggccggtaggacaaagagagggagacagaaacacacacccaaacggcttgagactgctaggtgcttcaccttcctgggcctgtttctgatgaggagggtttgtttattaataataagtgctatttctgtagcccctactatgtgctctgtatcactaccctagccctccatcaagagggatctgccctctcatctggctgaccccaaatcgaaccctttaacccgcatgctctactgcctccctgcgggccctgccttatcctcctcaaccgcccactggggacactctggagaaacctcggagtcttggaatagaaacccaggagccctgagccttggccctcaggccccaggagggaggtcaggagggaggcgtggacaagggtccggccgtagctggtcccgtcctggaagctgcttaagttcctggttcccaccggggccaagagtgatacctgatcctgggggattgtgaaatgacctcatgtggcagcccgcccgcggtgcccgcaaagccctccaccctccccttccccgctcggctccacccctaccccacgccccctcccgcgcgcgcggttaaatccccgcacctgagcatcggctcacacctgcaccccgcccgggcatagcaccatgcctgcttgtcgcctaggcccgctagccgccgccctcctcctcagcctgctgctgttcggcttcaccctagtctcaggtgagtggggcggggagaggcccggcgcctagaggggccgagccacgagcgccaggatggagccaggcggaggcgtagcctctggaggctggggaagtgggaattccgggggcggaagtggcggggacccttggagcctagggtgtggggtccaatgtgctggaggtggagagaccactgatggctgcaatttgggaggattctgtgctgaacgcggacactccgtggctgcagtgggctgggggtgggggctgctctgcctcgacctcggaagctccgagacgctcagctgtgcggcgtcccctagggctgagatctgagggccccgacgccaagggttagggagctctcgtactcccaggggtcagggactcctggtctggaagaaggagtctctgggggctgtaaggggactcctagggccagagactgagaattccttggggttaaggtttggagcaggaggtgggcatcctctggggctggcgctacgccccaccctcgactgtcccgggcctcccctcccaggcacaggagcagagaagactggcgtgtgccccgagctccaggctgaccagaactgcacgcaagagtgcgtctcggacagcgaatgcgccgacaacctcaagtgctgcagcgcgggctgtgccaccttctgctctctgcccaatggtaaccccacggcggccgagcgggaacggggcggggccgcgctgggctgggaggaggtgggagggcccgggttccgggaacaggggcgcccccggacccggggacccccgggaaagtcaaggcggttgaaaccagatccgtcagtcctctccctcgcacggcccaggggtagacaaaggcgtcgttgaaacgcagccaagggggggtccccacccctagctgggattcgagtctctggtgcatgacgggcttccgggcacgcacagccgggacattgttccccgcggcctggggacccggggccgcagtttccttctcgaaccggccgaagcctgccctgcgggaaagcccggagcctggggcgctcacctctcctcttggagtccctccctgggggcctcccccagccctggggaaagactgggagagcctggcctggcaagattttccccaattcctctgtccaggcggaaaggaactttacagatttaggaaaatgccccgctcatcttaaagatgtgtaagggagcatcggtgagaaaaaaatgttcttgcccaaggtcacaccgccatcccatggctgctggagtcatagtgagggttcagcttttgcctttcaggccaactggctgagtgattcgaagaaagtgaggaatcctccctggacactgtatcgcccttcgtcgtctttcagtcaatctcttccactctaaggattgagtgagcgcgagctggggactctctcaaaggtgcttgctggagctgcagtctccaccaggctatcagaacagggggtggcttaaacagcatggaatctcagctttccgttctccagaggaaaatgctgaggattagaggcagggataggacctggagagaaccaaggtactgtaatgatgttctttatccagaatacagcccctgtgacttttcctctctgttatttccttgaagatgccagcacaggctgggaaggtttgtaatacggtgacccaagacaccgatcagcagggaggtggtaagtggagggggactggcagcccaccaagggcagcttcaaggtcatgagtcccctcctctgggccagggagaggaggaccagaaggagagaggaagatttggagagaaagcaggcagcagccagatgagagaggtggaggagcaaaggagggagtctttgctgtttgatggatgaagaatttgttcccttatctcagatggacagactgaggcaggaagagggacaaggtcagatggcctcctgagccagggaggcagcctggaggtttgaatcctagttctgccattttctagttatgtgatcctgagcatgttgtttacctctctgagcctctgctctaagatgggaataattccaaactctataggattggcatgaggactaaatgaaataatgcatctaaagtgtctattagtgagaagatactccatacacagtggcttgttttgatcataaatggttccctatttatttccagggcagcccaatattacaggttcctactcctttcaagagaatgaatttctttgtattaggaagtcaagactgttggcaacttaacaacatttttttttgtatttatgctttaagttctggggtacacgtgcagaacgtgcaggtttgttacataggtatacatgtgccatggtggtttgcttcacccatcaacccgtcatctacattaggtgtttctcctaatgctatgcctcccctaattcccaaccccccgacaggccctggtgtgtgatgttcccctccctgtgtccatgtgttctcattgttcaactcctacttatgagtgagaacatgcggtatttggttttctgttcttgtgttagtttgctgagaatgatggtttccagcttcatccatgtctctgcaaaggacatgaactcatcatttgttatggctgcatagtattccatggtgtagacgtgccacatttcctttatccagtccatcactgatgggcatttgggttggttccaagtctttgctattgtgaacagtgctgcaataaacctatgtgtgcatgtgtcttgggcatttgcgttggttccaagtctttgctattgtgaacagtgctgcaataaacctatgtgtgcatgtgtctttattgtagaatgatttataatcctttgggtatatacccagtaatgggattgctgggtcaaatggtatttcttgttctagatccttgaggaatggccacactctcttccacaatggttgaactaatttacactcccacgaacagtgtaaaagcattcctatttctccacatcctctccagcatctgttgtttcctgactttttaaggatctccattctaactggtgtgagatgttatctcattgtggttttgatttgcatttctctaatgaccagtgatgatgagcatttttcatgtttgttggctgcataaatgtcttcttttgagaagcatctgttcatatccttcgcccacgttctaatggggtttttttctcgtaaatttgtttgagttcttgtagattctgtatattagccctttgtcagatggatagagtgcaaaaattttctcccattctgtaggctgcctgttcactctgatgatagtttcttttgctgtgcagaagctctgtagtttaattggatcccatttgtcaattttggcttttgttgccattgcttttggtgttttagtcatgaagtctttgcccatgcctatgtcctgaatggtattgcctaggttttcttctagggtttttatggttttaggtcttacatttaagtctttaatccatcttgagttaatttttgcataaggtgtaaggaaaggggtccagtttcagttttctgcatatggctagccagttttcccaacaccatttattaaatagggaatcctttccccattgcttgtttttgccatgtttgtcaaagatcaggtggctgtagatgtgtagtgttatttctgaggcctctgttctgttctgttggtctatatatctgttttggtaccagtaccatgctgttttggttactgtagccttgtagtatagcttgaagtcagttagcgtgatgcttccagctttgttctttttgcttaggattgtcttggctatgtgggcttttatttggttccatatgaaatttaaagtcgttttttctaattctgtgaagaaagtcagtgatagcttgatggggatagcattgaatctataaattactttgggcagtatagccattttcacgatattgattcttcttatccatgagcatggattgtttttccatttgtttgtatcctctcttatttcgttgagcagtggtttgtagttctccttgaagaggtccttcacctcccttgtaagttgtattcctaggtattttattctctttgtagcaattgtgaatgggaattcactcatgatttggctctctgtctattattggtgtataggaatacttgtgatttttgtacattgatttgtatcctgagactttactgcagtttcttatcagcttaaggagattttgggctgagataatggggttttctaaatatacaatcatttcatctgcaaacagggacaatttgacttcctcttttcctaattgaataccctttatttctttctcttgactgattgccctggccagaatttctaatgctatgttgaataggggtggtgagagagagcatgcttgtcttgtgccggttttcaaagggaatgcttccagcttttgcccattcagtatgatattggctgtgggtttgtcataaatagctcttgttactttgagataccttccatcaatacctagtttattgagtgttttagcatgaagggtgttgaattttatcaaaggccttttctgcatctattgagataatcatgtggtttttgtcattgattttgcttatgtgatggattacgtttattgatttgtgtatgttgaaccagccttgcatcccagggacaaagccaacttgatcatggtggataagctttttgatgtgctgctggatttggtttgccagcattttattaaggattttcgcactgatgttcatcagggatattaacctgaaatttttttgttattgtgtctctgccaggttttagtatcaggatgatgctggcctcataaaatgaattagggaggaggctctctttttctattgtttggaatagtttcagaaggaatggtaccagcaactcctctttgtacctctggtggaattcggctgtgaatctgtctggtcccagactttttttggttggtaggctattaattactgcctcaattttggaacttgttattggtcgattcagggattcgacttcttcctggtttagacttgggagggtgtatgtgtccaggaatttatccatttcttctaggttttctagtttatttgcgtagaggtgtttatagtattctctgatggtagattgtatttctgtgggatcagtggtgatatcccctttgtcattttttattgtgtctatttgattcttctctcttttctttattagtatggctagcagtcagactattttgttgatgtttttcaaaaacccagcttgtgaattcattgattttttttgaagggtttttcatgtctctatctcctttagttctctctgatcttagttatttcttgtcttctgctagcttttgaatttgtttgttcttgcttttctagttcttttaattgtgatgttagggtgtcaattttggatctttcctgctttcccttgtgggcatttagtgctataaatttccttctaagcactgctttagctgtgtctcagagattctggtatgttatgtctttgttctcattggtttcaaagaacttatttatttctgccttgattttgttatttacctagtagtcattcaggagcaggttgttcagtttccatgtaaggttatgcggtcttgagtgagtttcttaatcctgaattctaatttgatggcactgtggtctgagagactgttaggatttccgttcttttgcatttgctaattagtgttttacttccaattatgtggtcagttttagaataagtgtgatgtggtgctgaggagaatgtatattctgttgatttggggtggagagttctgtagatgtctattaggtctgcttggtccagagctgagttcaagtcttggatatctttgttaattttccgtctcattgatctgtctaatattgacagtgggggttaaagtttcccactattattatgtcggagtctaagtctctttgtaggtctctaagaacttgctttatgaatcagggtgctcctgtattaggtgcatatatatttagcataattagctcttcttgttgcattgatccctttaccattgtgtaatgcccttctttgtctcttttgatctttgttggtttaaagtctgttttatcagagaatagaattgcaacccctgatttttttttgctttccatttgcttggtaaatattcctctatccctttattttgagcctatgtgtctttgcacttgagatgggtctcctgaatacagcacaccaatgggtcttgactctttatccaatttgccagtctttgtcttttaactggggcatttagcctgtttacatttaaggttaatattgttatgtgtgagtttgatcctgtcattatgatgctagctggttattttgtctattagttgatgcagtttcttcatagtgtcgatggtctttacaatttggtatgtttttgcagttgctgattccagttgttcctttctatgtttagtgctcctttcaggagaccttgtaaggcaggcctgttgatgagaaaaatccctcagcatttgtttgtctataaaggattttatttctccttcatgtatgaagcttactttggctggatatgaaattctgggttgaaaattctttaagaatattgaatattggcccccactgtcttctggtttgcagggtttctgcagagagatctgcagttagtctgaagggcctcccatagtgggtaacccaacctttctctctgggtgcccttaacatttttttcttcatttcaaccttggtgaatctgatgattatgtgtcttggggttattcttctcaaggagtatctttgaggtgttctctgtatttcctgaatttgaatgttggcctttcttgctaggttggggaagttctcctgtataatatcctgaacagtgttttccaacttggttccattctccccatcactttcaggtacatcaatcaaacataggtttggtcttttcacatagtcccatattttttggaggctttgttcattcattccttttcattattttttctctaatctcatcttcattctttatttcattaaattgatcttcaatctctgatatccttcttctgcttgatcaattcggctattgatacttgtataggcttcatgacgttctcgtgctgtgtttttcagctccatcaggtcatttatgttcttctctaaactggttaatctagttagcaattcctataaccttttttcaaggttcttacctttcttgcattggggttagaacatgctcctttagcttggaggagtttgttattacccaccttctgaagcctacttctgtcaatttgtcaaactcattctccgtccagttttgttcccttgctggcgaggaattgtgatcctttggagaagaggtgttctggtttttggaattttcagcctttttgtgctggtttctccccatcttcgtggatttatctacctttggtctttgatgttgatgatctttggatgggccttctgagtggacgtcctttttgttgatgttgatgctattcctttctgttagttttccttctaacaatcaggcccctcagctgcaggtctgttggcgtttgctggaggtccactccagaccctgtttgcctggctatcaccagcagaggctgcagaacagcaaagattgctgcctgttccttcctctagaagctttgtcccagaggggcacccgccagatgccagccagagctctcctgtatgaggtgtctgtcagcccctgctggaaggtgtctcccagtcaggagacacggaaatcagggactcacttgaggaggcagtctgacccttagcagagctcaaatgctgtgctgggagatctgctgctctcttcagaaccggcaggcaggctgaagccacatccacagctgccccttcccccaggtgctctgtcccagggagatgggagttttacctataagcccctgactagggctgctgcctttttttcagagatgccctgcccagagaggaggaatctagagaggcagtctggctacagcggctttgccgagctgtgttgggctctgcccagtttgaacttcctggtggctttgtttactctgtgaggggaaaactgcctactcaagcctcagtaatggtggacgcccctccccctaccaagcttgagagttccaggtcaacttcagactgctgtgctggcagtgagaatttcaagccagtggatgttagcttgctgggctccatgggggtgggatccgctgagctagaccacttgtctccctagcttcagccccctttccaggggcgtgaatggttctgtctcactggcattccaggcaccactggggtatgaaaaaaaaatcctgcagctagctcagtgtctgcccaaatggccacctagttttgtgcttgaaacccagggccctggtggtgtaggcacccaaaggaatctcttggtctgtgggttgtgaagaccgtgggaaaagtgtagtatctgctccagagtgcactattcctcacggcacagtccctcatggcttcccttggctaggggagggagttccctgacctcttgtgcttcccaggtgagatgatgccctaccctacttctgctcgccctccgtgggctgcacccactgtctaaccagtcccaatgagatgagccacgtacctcatttgaaaatgcagaaatcacctgccttctgcattgattcactgggagctgcagactggagctgttactattcggccatcttgaaagctgaacctaaatcttttttttttttgagatggagtctcgctctgtcgcccaggctggagtg[137 bp omitted]gggggtctcgagtcctgacctccgatgatcccacccgcctgagcctcccaaagtgtgggattacaggcatgagccactgcacccggtgatctgtcagccactttccttgtcctctacagctaatcacccagttctgtgcctgtgttttacacacaaaaacctgcacatatttatagcagctttatttataattgccaaaagttggaagcaaccatgatgtacctcagttgatgaatggatttggctgggcctggctcccctctatctaacctgggaagtggagtgtgattgtgtgtgtgtttgttagtggaaggacgtgtggtttctctctgcatggatgaatgagtgtatttggagggtcatggtgctgagagactgcaactgggattcggtctgtgggtatgagtgaagattataagtgtgtaacccctcacatgtgtactgtactttacactttaagtggcagcatagtgcttaaccatggcagcagcagttaacacatagactctgcagctagatttcttggggttcaaattctgcctcaattctgtgtgaccttaggcaaattacttaacttctcagtgcctcagtttcctcacttgtaacacaaggaaatattaacagatccctccccttcttttaggattattgtgagaattagaagagttaatatatgttaggggcttgatacctggcatgtaataagagctaattaagtgttcactgttataatttctcataactacagagtagtttgatatttcagggagaaataatatatgtttgtttcccactgctttcacaacaaccctatgttgtaattagcactgttccactggcacctaaagacacggaggctctgggagatttctggccctaggccacgaaggcccacttgggactcaagctgaggtcctgtgattccatttgggagcaggaggagggatttgcaggtgatcttcctgggcctcctgagagcagctcaggtgcccaagatggactcaggcaggcagctctgctgtatgtgaagcccagtgaggggcagtgggggggccatgctgcaggtacaagttaatctccctgtatcgcctctgcccacttacccttactcctttttctacccagataaggagggttcctgcccccaggtgaacattaactttccccagctcggcctctgtcgggaccagtgccaggtggacagccagtgtcctggccagatgaaatgctgccgcaatggctgtgggaaggtgtcctgtgtcactcccaatttctgaggtaagtgaacgggaaagagaaagtgcattgatggccaggtgttgtgggaaacaggagaaaacgtcacccaggcggaggtgaagggaggttagttgcagggacagttgggaaaggtataccagtggggtgaccctcagcctgttctaaaagaagagtgaaaggtgggtagtctgatgagctgcattggggaggctgtctcaggcagagggaacagaataagcaagagcttggctgggtgtggtggctcatgcctataatcccagcactttgggaggctgaggtgtgcggatcacctgaggtcgggagttcaagaccagcctgaccaacatggagaaaccccgtctctactaaaaataccaaaaaaaaaaaaaaaaatttaatgggtgtggtggcgggtgccacccacccgctactcaggaggctgaggcaggagaattgcttgaacctgggagacagaggttgtggtgagctgagatcacgccattgcactccagcctgggcaacaagagcgaaactccatctcaaattaaaaacaaacaaacaaaaaacagcttggtggtacccttgggttgaaatctcgtggttgtcatgtgctacttttaacaatttctcagcaaagtaacctgaagataactgatagaatccaatagtgcagagatgagcaattgaaatctagagagggggtgtgctcttggtgcccgagagggaactatggtttctctaaactaagctatggtctccctggagccagggctctcagatgccaactgcatggataggctttgcagtcaagaagaccttggttcaaatgttagctctgacacttacctaaccttctcacctccctgagtcacagttatctcgcttataaaatgtagctaaataagatctaattgatcagataatcccattttaacctaaagaagaaggcatggcagaacttcctaatagtagaaggattcttggggagagaaatggccatgacccctcaggaaggccacagtggacatctgggaccacagtatacccaggtgcctgctagggatggtctgaccacagtatacccaggtacctgctagggatggtctgaaggagaagagtatgtctagaacctgtagaaaatgcaagcagagcccccagaaggtgaggctttgctgtgtgggtgtgtgggatggggtggggtcaaggagctggtctaggatttaagctgcaggtactcctgcctagtctaatggatattgttgttgatggtattgttataattttcttcctccagctccagccaccaccaggctgagcagtgaggagagaaagtttctgcctggccctgcatctggttccagcccacctgccctcccctttttcgggactctgtattccctcttgggctgaccacagcttctccctttcccaaccaataaagtaaccactttcagcacgttctgtctctgtctcccctgacttgggttgaggtgggtgggcaagtgttaagggtgtgaccagatcatccaggcatgaagtccagagaaggatcatctggtaggtgttagcattctcctggtggatccctgcatcaaccctatgaatctggtcattattcctccaggaggatggatgagaaaaacgaggctcagacaggtggtggggtgcttccaaagtcactcagattcattgctgggggtgctgataagcagcagcatgcaccaggtgccagacacggtgctgggaggtttgcttatgagatcctctgggtcctcaaaacaatccccagagcagttaacaacatacccctgtcatagacctggactccatgaggttacttgccagtggccacacagaaagatggcaatccaggatcctctcttgttgatactttaagtcaaagttttattttatataagtaatatagtcatatgcatccaaactcaaaagattaaaaaaagatatacaatgaaaagtgtctttcaccctttatcccctgtctccaccttccaccccagccaccaagttgttttctataaagacaaaaaatgttctcagtttcttgggtttcttttcagatatgtatccccagctctcaatcctttctctctcccttctctatttcttcctcttttcctttctattccccctctatgcctcactctattctctttctctctcctctattccttcctctccatcctccccctctccatactccctctcttaatgcccctctctctatgtactttcctctctctccatagtgtccccttctacttctctccccactccctatctctatcatctctttccatctgttagagtaggtagttagacatgagcaggacaggagagggctcccccctcacacgcccaggaatgtcaggtgacgatcaggtgatggtcaggtagtggttaaactgtctctctaaaatgatcactgggccgggtgcagtggctcacgcctgtaatcccagcactttgggaggccgaggcgggtggctcacctgagatcaggagtttgagaccagcctggccaacatggcca[140 bp omitted]cactccagcctgggcaacagagagagactgcatcttatttttattttttaaagttacaaataaaagttttcttggctctgaaaaacaaagatcagcaatgttttaagtaaaaagtcatagaagggttattttagtcttctattagttcagtctatgcagttaacacctgttctgcttgatattcataaacatttcagctctccatgagagtcctgaaagttttttcctcgattctaatgtcacaatctccaaaggtatcagaaacctgcattcaagagcacctgtcaaagtcctatagctgattataaaccaccttttgaagagaatcaaaacaagacaataattgtgggtgacaaaaagtcttaggacagccactactaaagccacatttgacaattttggttacttctgtggcatacaattttacacaacaattataattattaattacatacactaagccatatcagaattacaggactttccagtaattttggaacatatactaataacatatttatacaaatacagcccaaagaaagccaaacaccatttcatatttgacaatgcttcctgtatgatttttataccaaataagccaaatatgtcatttttggactttaggggacctaatagctataagattaattaggtcagaaaaagacataatttataatttggttttggaaagtttgttactatcaaaggtttaaaacacttgatattatagaagagaatcataggccaccataagtcatctagccaaaataactcaaaaattttaaaaaggcaaaaaactttattcatggaaaatcttgttcaagagaaagccaaatttcacctttgcattagtgtactattaatatcaaacccaattcttagtagaaccttagacaaatctcttcaattttaatgtttgaccctaaggtaagattcttataaatcttatgaccctttacaatttttgttaaagagcagatcagtgctccaaggaaatccttttgtgcttttattccaatgttcaatttacagaaaaactgaataatgtcactttagctttagccaatatgttcacatataaaatttcttttaccagattaatctttcacaaacctatcacaacttgctcaaaccttcagctttatgctatcttagttaaaacctttaaccctctaaactagtgtagccaaaaaactcccacatttccatgccttcttataatcttttaccaaaaacacatttcactttcctgacacaccttgcatgtaaaacgtttctgtagtagtctccattgcatgttacactgttaactcttagaaacttttgttgttgctgaaaaacctgataagtgagtgatttttaattttgtagcaggtgtggagcctaagatacgagacaaaaatgcagataagttatccttccatcatagtgagggggcatccctaactccgcatgtccacaggccttacctagaatctaatagctcaaagaatagctcttctttgacttttcaaaagtcaaagaagcagttcatgatcttaaagcgtttagcaaacctaattatctgacctaatttagaccaaatgtctttattttaccaataattttttaaactgtccttccaaagcttactaaagtcacgtgaactaaaaggcattagtttttattttcctgacaaaatatttaagcgcttatttttaagccaattaatcagagctccttcatatataaatgtcacacacacaacacatataaatatacagacagcagaagatccagtagttgttacgatttttcatttggcagtttttaagtttcttaattggattactggcttcagggtggggtcctttgaggaacagggttaggaaaacatgccgtttctagggcttaataagcagatacagatggaaagcaaaacagatcccccaaaattcagggtcctatttttataccggatcctcaattcccaaaaaagaaatactacagaacaagacaatgaatgatcttactgtgagtttcattgcaagacaacccagagtcaatcagcccattctgtgatcagcctatcccccacggaagccttatctcagtggtggggtgggggatggggatgtttccataccttccaggtggctgagagcacgcctctctgatccaaacgtgcagagagccaagtatcccgccataactgccactggccatgcccaaaagtatatttgctacctagttattacacaccaaagctcactcataatgtgaagtaatttctgatactctaaaaagtaaaaaatgtcaaataacgcaatgcaaaacagaacagagccttagcttttgagagagatctatctgcttccaatccctgggtcttaatgaggaaaacagatgttttccctaaaacggggtctgtggcacctcctctgtttttctcaaggagtccaaggctattagaaattatcttaggtcctctcacatgtgcatcaagagtggcaagaaggcaaaacagagaaacaattcagttgactgtgaaaaaaaaaataccttttttttccccttgtcttgttttcccctggtaaaaaaaaatacttttttcttcataagatccaagaagagaaaaaaacataaagaccttttaaatatacgtatagcttggatatctgcttttaattaagctaacttttaacaaaatctcttattaccagactctagccgggacaaacagccaatatttatggcctttaaactttaccaaaggtaatctcccaggtgaaaccaataagccttaactaaggttgtgacttaaccacaggtgtacgaagtattttcaaacaggtggtaagcagtttttacaagatttagaatctacaaaggcagcttagagaagggaaaattcaaaaaggaaagccagatgttgttcaaggaggggcagagaatcaacaaatggcaaagctcacgtagatatcaaactagaaaggactaattccctgagctgggaattgaaccctgaatgtgggctgccattgtgaaaagacaaaaccttagctactaagcttcagcattgggcagtttccatttcttttcttagaaggaccctagaggcagccaattttgagcttgcaaaggcttttaactgctcaagacaatttttagggctatgacgtgaacctcaaaattcctgtcctctggatgctggagactaagaaggtataccaccatatggttacaaggtcaagcttccaagggcataagacaaggggaaaacttcagtcagttttttgtttgtttcagggacctgccgcaaagtttgtaactgaccagtgtgccggactggcttgaacagcaagcttaccgggtcctaagcccatattctatcctaaggtacctctctttatgacagaaaaatacagaaagacaaattcatagcacaaattacaccagatttgctacagcttaatactagccacatgaaggcttttgtttcattaattgaaactttgcagaggaggcagtgatttttaccattcctacagtcggcgcgcacagagagaggccagaagtctgactggtaagaaattcttacccttttgctggcatgccaggtttctgggttccctttccctgagtggccctagcgaatctacttgctgcatcatagccctggaggccaagctgcaacacaaaattaaaaaaaaaaaaatctcaattttgtaagatgctgcccagtgggttgcatggggtaaccaaatgaacattttccattccagccagagcaaaatacgtgtgacaaaacatagacattagccgctctgcttagcacccaatatctaactggcaaggctcaaacttgcccccggttgggccttgtcatctttaatccattcaaagtggggtggagtgacctccgacccggaatttcaacatgtggtctctgggcaagatggaagagcaggtagtctcaagtaacagaaacgataggaaaagaaaaggagagaaagagagagtaagagagagaagcctggtctgaggcagggtggggaagcggggagctcagggagaccagaggaatacccacccattgcagcaacactgaatcaaaagttcaggcaggtacttgtcagtcacaaagggatcttttccagcagtcccatcagctctcaagttgccccctctggggagaaaaaagttccccatgttccaagatcctgtacatgcctaatccagtcacctgtagccatcagcaaacagtgcaaggcagattaatccagagaatagcagttaacatttcatagtgccaaatccatttctaaccaagagggatgttactgagggggacctctgacccactgtctttctcttttctttctaaccactgtctttctcttttctttctttttttctctttctctctttcttctttttgagatggagttttttgctgtgttgcccaggctggagttgtgcttcatcctaaggtacccctttttatgacagaaaaatacagaaagaaaaatttacaaaatacagaaagagccccctctgctggagaagaaatctccacccactccacctccagccccgactcctcagcctctcccacccgctccgccgccacagccagccctgccctcaccacccccgctggtggcccccacgtccagctcaccaccgccaccaccgctgccacctccaccagctatgccttcgcctccactgccacccccgccagccgctgccccaccggctgcccctccaggggagcccgccccccatcccccgaggacgctgagctgccggacacctggcctctgcacctggccaagaagcaggagacggcggccgtgtgtggagagacggactagaaggctgacgagagtggcggagagggcattttccgtgagcaggacgagttcgtcatccgcgcagaggacatcctttccctcaaggtgagtcccaggcttctccaaaaactgggcctgatgggttacttgagtgtttgttgagcgcctgctggatgagaggcttgtgttgggacctgcggatccagtcatggctgagggagaatggctgggcccactggaattcacagtccaatggggccgttagaggtggcagtgacctgcgggcctcagaggtgttatttgcgtatgtgtttatacacgcattacctgtatgtaaggtaaatacttttttttttttttgagacagagtctcgctctgtcgcccaggctggagtgcagtggcgcagtctcggctcactgcaacctccgcctcccgggttcacgtcattctcctgcctcagcctccagagtaactgggactacaggtgcccaccaccacgcccggctaattttttgtatttttagtagagacggggtttcacggtgttagccaggatggtcttgatctcctgacgcaccgccttggcctcccaatgtgctgggattataggcgtgagccaccgcgccggccaggatttttgtttgtttgtttgtttgtttgtttgtgatggagtttcactctgtcgcccaggctggagtgcagtggtgcgatctcggctcactacaacctctgcctcccaggttcaagcaattctcctgcctcagcctcccgagtagctgggattacaggcacataccaccacacccggctaattttgtatttttagtagaggtggggttaccatgttggccaggctggtctcgaactcctgacctcaggtgatccacccgcctcggcctcccaaagtgctgggattacaggcatgagccaccgcgcccagccaccccctatggcttagaagggactctaatttttctaagttaagcctttaacccaggtttggtcaagcgtcgttgctttttattaacaggggcctttaagcctctttgtcttaggagggactctaactctcctaagttgggcttctaacccaatcccatcctttacccaggtaaaacgtaccccaccacatatccagagttggccaattggtgctgcagtctttttctttgggtcagaagtctcttcagtatagtcgcttcatggtggccaggaagatgttaccagaaaggagtccggatccagaccccaagagagggttctcagatctcacacaagaaagaaatcaaagcaagtccgtagagtaaagtgagaaagcaagtttattaagaaagtaaaggaaagggaaaaagagtggctactccatgggcagagcagccccaagggttgctggttcaagatttttatggttatttcttgattatatgctaaaacgggtggattattcatgagttttcatggagaggggaagagatttcccagaactgaggatccctcccctttttagtctatataggataacttctgagtgttgccatggtgtttgtaaattgtcatggcactgataggagtgtcttttagcatgctaatgcattatgattagcatagaataagcattgaggatgaccagaggtcactttcattgccatcttggtttcagtgggtttcggctgggttctttaccacatcctgatttattagcagggtctgtgacctgtatcttgtgccaacctcctatctcatcctgtgactaagaatgcctaaccctctgggaatgtagccaagcaggtctcacccttattttatccagcccctattcaagatggagtcactctggttggaaggcctctgacacaatgatttcttactttaatcctggggtgtatgcttatcctttggggtgagggagaaggagaataagggagtaatgtcagtgactctggccccccaggaacagccttcatgtccttcccttctctacccaccgtggaacatgagagatctggaaagtttcagtgacattgtctggaatatctggccagcctggcttggtgtctatcaggctttatcttcctcatcttcttgtgggaccagggaccagggaccagacaaggccccagggcatctccattcactcccaggggcacaaactgatagagcctcctggtgggagtggggatgctttgtgcatatgatagccccttggccagagatggcagtgtagattttcccagctccccactttctgatttctatttttgtccatgctcggggctccccaaccttttaggcagaaacagaggcatccagtgatgggttgggaagagttgctgggaactcggtgtgtgactaccactagctccactttctcctgtccttctacaggtttgcattctgaaagagtggcccaggcagggtgatgtctaacccagggatggcaaaggtgtccacatgccatcatttcttccaccagcacccatatcacatgattgctgctcctttccattagcccatgtgtggccacagagccctcagcacagggctccaggcagctgctacagctgcccattgattggggttgatagatagatttgctacccctgatttaactcaagaaataaaatgctaatggtgaaaagtcagacctggcagttgaggttttactgagtaagaagactgcacaggggaccctgagcaggggtccaaaggagatgggacctcaggccctccaccagaagcttaagagggggtaaagctttttcaaggggtccctagcccagaggcctcctgcagaagatgaggtggaagttgccagggatctcagtaatgcacaggaagaagctaccagggaaggaggactgagaggtgggatggggcaggtaagaaagcaggggtgggttagacgaggcagaacctctggctgagacccttcctttaattttcttttttaagctgcttggtcaataagtttattgtttttatctgaataatcttatagaaaatgactatttgccagacgtggtggaacgtgcctatattcctaagtacttggaaggccaagtgggggaggattgcttgagcccaggagttggaggctacagtgagctatgattgtgccactgcactctgacttgggtgacagagcgagactctgtctctgaaaaaaaaaaagaaaaaggaaaaagaaaagacaagaaaatagttgtttggcttagcgctcagcagcctgctcctgagctcttagaaaacttgccttctgagctactcagtctttcttctggacaggggacgtcttgggatggttccaccttttcttaacttcttccccaggcttcctctcgtgaactggattctcttgttcagcatcatgagctttcttacatgtctctccgtcatgactggagttatgttgttctttatgtattgagaaaattgtttcttgtaaacatcttcatcttcttacattgggtaatgcatataatctgcgatcttctgacccaggatgtgcttctgcattgaactccctgctttctgaattggaaccagggaattgtttggtaactgtgagggatagaaaacctcaatccacacctcccttcagggcccccctacctttatttccgttggtagttctggcaagtagcaagtgaaggcaccaagtaaccatcaatgcttcccatgtgatacccatctctgctcacctccacttgaccttcataggtgttgtccatgccaagactattgaggggccttcgggtcagcacaggccagtacaatgtgctgcatcataatctggctggccaaccttcatgctacactttagacattcatgaacatatgctgtgcagacaatcatattcccttctgtgtgggcaaaaaccatatgacaaatgatctctctgttagttgcatgaactatcctgaattttggtgtgttctacttattttcatcctggattaccaagtgtgtctgagcatagtaatcagtttaacccactggtcttctaaatgtcatctgtatctcttaaagtaggccttactcttaacaattttaacacactccatcctccggaacagagagctgtgtccatggcttgacacagacctgcagcgtgcaaggggggccaggcaaggcggaagccctacgatcattctttgatcaacttttgcagccaagtgaatgctgtaggttggggactctgaagatttgtgattggaaagggggaaggaaaaaggacagggtcccagactggtctcttccccctcttccaggccttgatgggccacacttgatataggcagaccacagcaaagcttagttttggccaggagaacagctcccagggcccaggaatcccagtaaacaggtggatcgagatgggacagccaacctcaaggcccctcacagaaccactcagcccagctgcccctccagacgtcagggcagggcttcttcccgcacttattttctcccatttccgatggcaaactgctttgcagatgcctctaaaggccatccccagcccaggaagccatgtatggtaatacctacatggaaacagacatcttctctgcaggaaagtgcaggtttggggttggagcgatagtaagaagttacatgagtgagctggagcttagaaaataaagttctaaagacagaccagtcagggaggggaaggtcctgccccagaaacaacatcagcagaggcattcactcattcaatatttataaagcacttactatgtgttctattctaggtggtggggatttgatagaaggaaaagagtgtgtgtgtgtgtgtgtgtgtgtgtgtgtgtgcggtggagaggatagccaataaataaatgaactaacacatatataacatgttaggtggaggaaaagttatggagaaatacacaggtaagaggaatagtgagtctgggggtggggtagagatgggggtgattactttgcaaagtagtcagggaaggtcttaaagtattattcaagtagtgaactcagtgaaggaggacatgagctgcgtgacaacccatgagaagaggaatttagagagaagagagttccagaacaaaggacctgaggtcagagtgttctcagggtgttggggatcatccaggaggctggcatggctggggtgaatgagtggtcaggagcctgaggtgagttgaagtcagagaggtagcatgggcacagagaataagggccttgtggctcattgcaaggattttgccttttatttggagcaaatttgggagccactggaggagtttgagcagaagagtgacatatgacttcagttggaaaaggatccttctggctgctgtgttgtgaatactacaggggagatgcagaaccagggagggcaggtaggtcactgcaacagggcaggcaaaagctggcttaaaaaaatgcttcaggctgggcatgggggctcacacctgtaatcccagcactttgggaggccaaggctggcagatcacgaggtcaggagctcgagaccagcctggccaacatggtgaaaccccgtctctactaaaatacaaaaaaattagctgggtgtggtggtgcgtgcctgtaatcccagctacctgggaggctgaggcaggagaattgcttgaacccgggaggcagaggttgcagtgagccaagatggcgccactgcactccagcctgggggacagagcgagactccgtctcaaaaaacaaacaacaaaaaactcttcatccagtggtatgaggccccccacactgtcaggtagaaatcttggcttccttaaacaaacctttattgtttcccttattggaagtattccttccttggtttctaaaacaccgcagagccctgagacacaacatttaacataatcatagtaatgctgaattacaagccaactcaaaattcagtgacttaaggcaacaatcattcgctctcactcccatatctgtgggtctgctggggttcagctgatctaggctgggctcagctggttcttcttgaaccagcaggttccataaaatgtattccctgggtcacctgaggtcaggagttccagaccagcctggccaacatggtgaaaccctgtctttactaaaaatatgaaaaaaattagccaagaatggtggcggacgcctgtaatcccagttactcaggaggctgagggaggagaatcacttgaacccaggaggcggaaattgcagtgagtggagatcaagccattgcactccagcctgggtgacaagagtgaaactcggtctcaggctgggcgcagtagctcacgcctataatctcagcactttgggaggccgaggcaggtgggtcacgaggtcagaagttcgagaccagcctggccaagatggtgaaaccccatctgtactaaaaa[131 bp omitted]tgggtgacagagcaagactctgtctcaaaaaaaaaaaaaaaaaaaaaaaaaagcaaaacttggtctcaaaacaaaacaaaaacacattctcgtaggattggtagaaggataagcacagattccaagtctgtgctttcatcatgtctgttagcatcattagccaaaataagtcacataccaaccccgaagttaaggggcagagaaatatactctgcctctagtggaagaaactgcagactctttgattgtggatatagggagggtgatgaattggagccagtaactcaatctaccacagttattatgtttaataacaagatatgctttggttgctctgatccatttattctggctgtgggaaaaaaagcaccatatgctggttgctgattgagagcatgtacagtatcctgcgagatagaaccttacccactcgaagttttatttccaagttgttaatgtcacacctgcaggacatcccaccattccacaagtctggctgcttctgggtgatggagaacaggataaaactggtgaatcccatgaataacaggccctttctttctttattttactgtagcactctccctagatgtctgtatggttaatcttcactcacctcattcaagactttgcttaagtgtaaccttctcaaaaaggcccactatgaccatcctcattaaaactgcaacctctgcatccccagttccccttattctactcactttttccccatagcaccttgtactactattagtctatataattaaattatatattatgcttattgtttattttctgggccccaccctgaatataatatttattatctttgccccactcagagtgtttgtgatcaagaaggggaaaggaaaagattattgttttgtccgttttgtgtttggcatatagtaggcactcaataaatatatgttaattgaatgaatgaatgaggagttcttttctagaagcaatattatatgggatacagtcactgtgattaagaaattccacaaatccatgggtaccagtactggcacaggcatggaaggcaaggaaataaaattcaaattcagaatatctattccagtgagggccaatcacccctgcctccatgcttttgaaggggtctcatgtacctgtcaccagatagctggttcattttctctggttaacggcaccatatcagggcttagattggccatcacgctagcaggctcactgctggagtacactgctgtataccataagtgtcaataggccaatcagccttgctaagtgggaagtccatgtcattggccccaggcttagtccctaccactgtcacatggtgctttgttcatgagccccctgagcaagcactagggtggccagggagacaggctgactgacatctatgggggtgtcatcctctctaagtgattacaagagcttctcttgtagcttttgtgaagtgcctgcgggacattgagggaggtcttggcccatctcctgggctcagttcctctttggctttgaagcccagtaaatagctaattctatatgttgtcatactgggtactggccattattacattgtcacaatgggactgtgcaagtgtgctgtctcagtttcacatagcttctgcaggaagatggtactaattgtgtagtaagaaactgtgtttataacctggatattagatcaagatggtgaagattgcttcacatttttacaacatatcagggtgatatgttgcaaatgtaagaaacttggtaaaccccatgtgggatttcctctatctagtaggcttgcaccaacccaaaatattccttgtgaggaaactggaaggttacagaagcaacactcattgaaaatccccccaatcttatgtcctctgtaatgcttttctgaaaatgcatcatctgatcatattgcagtaaatgcaactgctatatgatttaaacgttcatttctctaagcctcaaacccggtccaattccatttatgtagtgtccaacctagggcttggtttaagtgaggagaggtcaagagtaagacaagatctcttccggattttgaggtgtcctaacacccattatttgcaaatgagcttaagtcctttcagggaccaccccagcagaacatggtgtccagaagagtcagaggagctaattattggattcaatcacagaccagtgcagggatcttggagtccaaaatacactcttcttgggcagggaaggggagaggctgcccgctactgtaactggcaaaagggtttggctgcttgccacttgtaaaaagaagccagtataatgagaatgaagtgtgataaaaagagagcaagattttattatccatgctagatagaggagaagtggatgtaattctttccaaagatttccactttatgatttgtagaggaaacacggggtcttttaaagacagggttcagaatgcagaagaggcagggggctaggaggtgtcaggtggggtgagccactccaatgggttgtcttgaattattgttccatctggtgaaggggccagcaccattgtggctgaaagtgtctggtccgtatcaggatctggtccctgaagcttctaaggcaacatattgaccagataagtgagtatgatgtgtgtttaacaagcatctaggtaaatacatgtgcgaaaggtgtgggagcgcagaatgggaaaagaaagggagtggaggtttacagcatattccaaagctgtgtttcgagatgaaaggaaacacatatgcagtttgtctcaaagttatatcttgagactggggagaaaggaggcaagaaaacaaagttttaaaatgtggtttgaagccaagctcctcagttacgctattaaatgcaatccatgctattaagacagaaattgtggtagagctaggatctagtaatgctaccctttcctgcctactgccagtcttggaaattcttgcccccagcctggccctcacccttcaccctaatgctaccatcatccatccgccccactctaccagtcccagtgcttctgcagtaccaagtcccacagccccataccagctgtaatggctcgagctttcccttcttcacttttgctcctgctggtgctgtgactgctgcatggttccacttgtcctgtccattgatgcagcctttggaaacgccaacttgaaaaataagcgaatggcaaaaaaatcctcctcctttcccacctcatcactatgtttacccagttcataattcaccttaaggtcatggcaaagagagagggtggggaaaaagtacaaatggagtgatggcagacaaaacaaacaaacacaaacaaacaaacaaaatgagccctctagtcattgctgcagcctgttggccaggagataggggtctgcttagcttagctagtagaggtggtgcttggaggagctatagcatgcaccaccccactcccgccgaattttttttttttttttttttttttttttgagacagagtctggctctgttacccaggctggagtgcaatggtgcggtctcggctcactgcaacctctgcctttgggttcaggcgattcttctgcctcagcctcccgagtagctgggattacaggcactgccaccaagcctggcaaatttttgtattttagtagagatggggtttcaccctgttggccaggctggtctcgaactcctgacctcaagtgatccacctgccttggcctctcaaagtgctgggattacaggcgtgagccacgtcgcccggcagcacgctgactttttccacagaacagcatagcattagtaaatcctgcctgcagagcatacaggtcttagacacagaagtttctgtatatccccctccccagctgagactttaacccccaaatgtccagggcccagccacaccagacatgttgggatgagctcattacataaaaacttggtgaatttgcaagagatgggacccctggggctgctctgccctagagtttatggccttcacatcttgaacacccctcagaggatttctccctggatgaacaatccatagcctgtggtttattatgggttagggttagggcttttgcaccacctgggggatagacaatgaaggcaactgccctcttccatcaatctcaaagtaaatacaaatgggaaggtttgtggtttcctcagcaagcagagctctgtgaagctaggtggcaccacaggatctacttcaaacaagaccccaatgttggtcgggcgtggtagttcatgcctataatcccagcactttgggagatggaggcgggaggattgcttgatccaaggagtttaagaccagcctgagctggtttctacaaaaaatacaaaaaacagccaggcatggtggtgcatgcttgtagtcccagctactcgggaggctgaggtgggaggaccacttgagcccaggaggtcaaggctgcagtgagccatgatagtgctactgcactccagcctcagcgacagagcaagaccttgtctcaaaaaaacaaaacaaaacaaaaaacccggtgagctctgcagcctcatgataggtgcctgggttggttgagtggttggagcacagaaaaccctagattggctcattcattatctacgttgtagggccagagactctggtttgaaataatagaaatctcttgacttcttaatatatgacttaggtgagtacatgcttatcagaaggacagttctccatccatcctgggggattcccattcagctgtggcagattagcagagtcactgtcatttcttatacttttctctatgatttcataggataccactgtataccactgtggtgacttccccttcactgttttctttatgttttattcttttctttcagtgtttaattttgacataatttcagacttaaagttacatggctgagcacagtggctcatgcctataatcccagcacttcagaaggctggggcaagaggatcacttgagctcaggagtttgagaccagcttgggcaatgtggagagaccccgtcactacaaaaaaattaaaaaatttgcccagcatggtggtgcacacttgtgatcccagctcttcaggaggatgaggcaagaggatctcttaagcccagaagtttcaggctgcagtgaactgtgatcacgccactgcactccagcctgacaaacagagcgagaccctgtctcataaaaacaaaaagaaagaaaagttgcaaaaatagtaccaagatttcctgtatacccttcacccacattcccgaaatgctaacattttacaacatttttcttaatcctctctgtgtctgtctttctctgacacacacacacatacacacacatataccccacatattatgtttgttcatagcatatgggaataagttgcagacatcttaaatacttcagtgaattttctaaaataaaggtattctttaaaatagcctcagtacaatagtcacattcaggaaatgagcattaatacagtactattatctaatctagaggcaaaactggctacataattgtaggggtacccagtgcaaagtaaaaatgtggagctccttgttcaaagaaacaggggaaaacatcactaaaggtactcaaataaaaggcttttttctttcttgcagagtctctctgtctctagacctctcatggagctttttatttattgtttctgtcactctccctcaggcacggggatagttgtggagcagtgcagaccctcagaactacctagggtccctgaccgctacttggtggtgtgtcctggagggttccgcttgctgctgaattcctcctcatgccagctgccagactgaagctctgtgacccagctaggggtgggaaatcaatcttccttgtccataggtccattgcaccaacccatggatgggcagtccccaagcgattgcaacctctgtgctgagacatgctcagtacaggatcaggataggtgagaggctggctcctgccaagtcaccagttgaatgtattgtgctgctgccagcctgggactgggacagtaattggcactccctgaaatgccacaggatgtgcacacctaactctgacccttcctgcaccctttcccaagcccccactgggagtggttggcaacggtagaacatgagcctccccttgccaatgtgattcaactgtcatctgcatagcagcagtcagggggcaaaggtggaaaggggcgggctgagcagagccatggtgtcagtgggtggagggcgagttgctgagaacccatcccagggaggcagcaagaggtggcactgctcttgagtccggacgcctagctcctggagcatgcaccatcgtctaattaaccttcacttacaaacacaaatttaaataactgagaattttaagacaatgaccacagggaattacatcctgggtgcagggtccttctgtgtccagggccctgtgtgatttgggtgcatgcctacaaagcccatctctagaccttattcggattctacaaattgtctcaataatgtcctttacaacaaaagaaaatcttggatcctgtgttgcatttagctgtcacacctctttaatcttctttctttttcctttttaaaattacttagttcaggagcagatcttcctttaatcttctttcatctggaaaagtttctcaatctttttttgtctttcatgacattaacattttggacgattaaaggccatgtattttacagactgtctctcaattgagtttatctgctatttcttcacaattaaattcatgttatgcgtttctggcaggaatactatagaaaagatactgtgttctttgtggtggatcataccacgaggcacatgctgttgatttgttttgttactaatggtgttaactttgactacttgagtaagatggtggctgcctattttcccatttgcaataaataagtatttgtgggaagatactttggatctatgcaaaaatattattacttctcaaaattttacccactagttttagcatacattgatgattcttgcctaaatcaatgattatttaatggttgctagatgatgttttccttttatttttttcttttatttatgttttttgtagagacggtctcgttatattgctcaggcttgtcttgaactcccagcctcaagagttcctcccacctcggcatcccaaagtgctgggattacatgtgtgaaccatcatgcccagctgttaaatgatgattttctaattctatccttgaccccttgtctacctttactgagccctttttggcttcctatccttgcctacgatgtgacattttgatgtgttccatctactcttctgagcctgtgggcacgatgcgggtaggggaggtttgggactctgatctctctgaggtttgggttaaatgtcttaagccagggtttactccattagttaatggagtgtcttactcccgagagggcattaagcttcactttcccaccatccttctttctctccttccttccttctataattcagagactatgagaatcatggctctgactcatagcttaacactttaactctaaaaaagaaatcccaggtccctcttttcctccatggtatcatgtctacaaaactaatctacaagtacttgttgagtacttattctgtgcataccgttttgcttggctcactgtagagaagaaatgtgtaaggcaaagtcactgctttcaagaacccacagctgtaaacatgaagagtagaagcaggcaggcctggaatatctctgtgtagtctacatggagaggtccaggggattttatgggatggggaggtaaataggtcatggcagagctgaactttaatgatagcaaactgattaaaaagcattggctctagaattagactttgattccaacaccatcttcattccttcctaatttgttattctgggcaagtaatttatctttctgaccttcaactttttcatttgtaagatacagatattaatagaatcttcttctcagggctattgcgaatattaaatgagataatgcatgcaaagcacttaggttggttcctgacatatcctaagtgtttcataaacagtagttattaaaatcttaaaggaaggtattatgtgtcaaaagcttttcaaatgcatgtccacagttgacccagaaattccacttagaatctatcatgagtaaacaaccagaaatacccatagtgattacttactatatcgagaaaacctcaacaacctttaacatttaacattaacatgtaaccattgaagcttgtttaaataaatggtgatctctttatgcaagtaaagctctacacatattagcaattatgttacagaatatttaatgatacaagaaaatctttacctaatattgtcaactgggtaaatctatgaatctgcattaatatatattcttaaactgttctctatcccatatattctttcattcttcccagaaacatttttaaaggacttgaggagcttgccactgccccaaggggcatttggaagatttttctctagcaagtgtgaattaaaaaatttaatgggacctcaatattatgtcaggagggttcttcccagtgctcatgtagcatatctggcacacactagcctctggtacactttgtgagagttaagtttatctgtttgtctttgcatgccagcaacttttataacacaagagctctcagaatccagacatggtgatttagaactactgggtatttgtactgatagggaccaggcactatgagccttaagctttcacctgtgaataaatctcagggaagaaggagaggagagggaagagaccaaagaatcgacattttctccccacagtgtggcctttttattgatttaaagagaagagacgtgaagctgcaaaacttttttggtagcaaagcagggtgtttttatcagttcttattttttgctttgaattctcaatgccactacctctgtccaagcttacaatccgtcataaccagatgatggtaaagctgcccaccctgtttctctaaacaaatcttcccaattctagaactgagactttttttttttttgagacagagtctcactttgtctctcaagctggagtgcagtggcatgaatttggcttactgcaacctccgcttctgggttcaagtgactcttatgcctcagccacccaagtagctggcattacaggtgtgcaccaccatgcctggctaacttttttgtatttttactaggtttcaccatgttggccaggctgatcttgaactcttggcctcaagtgatctgcccacatttgcctcccaaagtgctgagattacaggtgtgagccaccactcccagccaagaactgagactttaagctctcactgcatttgactctgggcaagttgctcctggtggcagtcagacttctcagatgactccaatgacctccacttcctggtttttatgcctttgtgtgttctcctcctcgagtgtggactgaacctagtgacttgattctaatgagtagtgatgtcatggaaaatgttgggacgtcacttctgagattaggttacaaaagactatgactacaataacttattgtatatttcaaaatagctagaagaaaaactttggaatgttcccaacacaaagaaatgataactgccttgggtgatggatatgccagttattctgatttgattattatacattgtgtgcatgtatcaaaatatcaaatgccccccataaatatgtataacaattatgtattaataaaaaaaagactgactgggcttggtggcttacacctgtaatcccagcactttgggacgccgaggcaggtggatcacctgaggtcaggagttcgagaccagcctggttaacatggtgaaaccccatctctactaaaaataccaaaagtagccaggcatggtggcacatgcctgtaatcccagctactcgggaggctgaggcaggagaatcgcttgaacctggaaggtggaggttgcagtgaaccgagattgcaccactacactctagcctgggtgacagagtgagtgagactccgtctaaaaacaaaagactgtgacttctaccttctattcagtctctctggagcttcttgcttgctcactctgataaagcaatctataggttatgagctgccctctggaaggacccactgaccaacgaactggaagtgacctgcaagcaactgaatcctgccagcaaccatataagtgggcttggaagtgcatgcttccctagttgagccccagccagccaacaattagacttcatccctgtagaagaccctgatccacaggactagttctgtagtccttgtgtcctgcctcttccctcacctcctgtgagagttcccctgaattcctgccctggtggtacagaatggtgtatccagtctgcccccactgcaacagaactgccttctctttgggaatttgtttcttcacagaatcacaggatgttattttcaaagggtgtctgtgcttgtgtttaaccttgtgctattttataataatgaaccattggaaaccaagtaaactaagtaaattacaatgcttggtaggtcagaatattatgtagccattaacaatgacaccagagaatattcacccacctgggaaaaagtttataatataatgctaagtaaaagtcttggtagaaaaaaaaaaacgctggtagaaaatagtgaaaatagtacacactctctctccctccttctctctctctctctatatatatatatacacacacactatatagagagagtatatacttattgtatatgagtactatttttactattttcatatatataaacatttataatagcatatataaatttatacaaaaatatatagcattatatactatatataaagtatatatactttatatgcatatataaagtaattaaaagcctatggagaggatattactttgagatgctaattggagctttatacctgtagatctacttctctttggtctttctctcacttctggcacctggacattctacctcatgcctggggaggagacaggacagcattatacagctcgcagaatatttaaattcttggcttgtagagttcaaaagagaaggttcagatctaagacaaagggcttatttggagataactgagcaattaagggtatcagggatcttagagatcattagaccatcggagctagaaccttaattttgggaagaaagtgttttaattacatcagagtgaatgcagatcacgagatgaaagaatatatgaaaaaccagaatcaggttttaacaaccccttgcttcctttctgctccccgccatgtataaaattctccccattggaggtttaaagaagagagttagaagggaaccagaggaaatgaatggtggtttgggatcctgagaagggggttcttaggccaatagggtaccaggtatatttgggaatcaagagaaatgaccacagccagggtatacttccacaactaggaagtatgaattgaggaaccactagttagaactgagaacccttgcagggtagatcagaaattggaacatgggaggtctatgtatagggtttttagagggtccctttgagtttcctatagtcctaggtggtacagagcagtgaggtatttcttgagctctaaggagcagcagtgaggtatttcttgagttctatggggcatataagtcactgagtgagctctcatcaaatgaggaggatgcaacagttacctgccagaaaaatatctggcaggaataaaacagtgtgtatatatgatagtgaccaagaatcaagcacacttcccattggatgccttggaattaagccaatgcactggaatgtagaggcaacccttaggggtatgtggccgtcaaactaatgaaatgacagaaattaatttccattacctggttaaatggaagatcaaaatgaaaattcaggccaattacaatttttttttttatttttttgagacagagtttcgctcttgttgcccaggctggagtgcaatggtgcaatctcgactcacctcaacctccgcctcccaggttcaagcgattctcctgcttcagcctcccaggtagctgggattacaggcatgtgccaccacgcccggctaattttgtatttttagtagagacggggtttctccatgttggtcaggctggtctcgaactcccgacctcaggtgatccgcccacctcggcctcccaaagtactgggattacaggcataaaccacagtgcccagctgccagttacaattttttaaaagacattttgagcatatctgagtttgtagtagagtttcattctagctacaaattgcacttcactgccaggtactcaatgctctttgacctccagactttcaccatctccatcacaattagaaaaattttctcaacagttgttgggtctttgcatcattccctccagatccaaagtccagggcaggagcaactgactggctaagttcatgtcacacactcgcactcaagcagccaatcagaagagagaggtagtacctggactcttttcgtttccatagaggagaggaactcagctaagaaccatcagctaccaaactcccagctggggtaataggcacttcattcctgaaaggaaatatgggtgctgtccatagcaactgccagaaacctttgggtaggaacctgaggcaagttcagtagtccgcccttatccgtggggcatgtgttctgagatcctcaatggatgcctgaaaccacgaatagtattgaaccctatacactatgttgttgtcctatacatatatagttataataaagtttaatttataaattaggcatagtaagagattaacaacaataataacaaaacagaacaattataacaatactccagcatcacttatcttgcattttttgggcattaagtaaaataaaggttacttgaacacaaacactacaatactgtgacagccgatctgataactgagttggtttctaaatgactaatgggctggtagcatgtgcagggtggatacactggacaaagggatgattcacatcgtgagcaggatggcacaagatttcaccccaataacaatgtgcaatttaaaacttatgaattgtttatttctggaattttccatttcatatttttgggccaagggtaactgaaaccacagacagtgaaactgaaaatatgggggaactactgtactcatatgaattttggcttttgctctgagttagatgaaaagtcaatgaaggattgctaatagcagagtatcaggacataaagaatctttctggctgttcttttaagaataaactgtagagagcaaggactaaagccctgagaccagttgggaggccatttccgttttaaaaaatggatgatagatggaccactaaagggtgggtgaacagcggataagtgttgtgtgagcgtgtggactaacttgtctatctccacctgtgctgaaggtttgtcttgtctgaagctgttgagtattgatagaatgatgcaattttagtcatgagactgtaaccaggccccttgagatttcagcaccccagcatttttagtgactaaaataatgaaaatgttttgcacttgctttttgcccaatattccttgtttccacaacaaaattatttgttgcaaacaaacagttgctgatgtgctgtttccttgttaaacggagagataacttcagggtcacgaaaaggtttgcaagaagaaatgaaagactttaaggacgttgtgactagctgctgactcccagaggtctagttgttccaggtgttacctgagagggaagaaacacaggcttttcccctttgttccctgaaacttcccctcccctactccccagccacattaaaagcccactttgttattgttgttaaggtggaattgagagctcttacccttctgccttcttgctttggttacattgaataaacatttctccatctccaaacacccatgcatcaatgttggcatcagctgcccattgggtacacaagcctgaatctggggttctatgacaattctggcgaccatggaagaaccttgtgcccatggctgggcagtcccaaccaggatctgcgtgcacagggagtccccaaagctgcctaggcaccttgcctgggggacacccctcactggttcctttcctgccagtggtgaccacttttggtgcaatgctcgcttggagtgaagacatgtacctgactttggtgtacttttggatttgcatttcctgggtgagtcaccacgacctttgtgacaattctcactggatagtgatctggatagcaccccatttgaccccagtttcatagcacaggaaggacaacggataggcccagccttacctgagtgtggcaactgtctaacagatccagggctagggaatgtggctttaatgaccgcctcaactactgacactgtgccctgtgctcctgaagaatatgtttcttttctctttcccttcccttcctttcccttcccttcccttcccttcccttcccttcccttcccttcccttccctccttcccttcttcctttcttcctttcttgacagagtttccctctcttatccaggctggagtgcagtggcactgtctcagttcactgcaacctccacctcctgggttcaagcgattctcatgactcagcctcctgagtagctgggattacaggcattcaccaccatagccagctaatttttgtatttttagtagagacatggttttgctgtgttggccaggctggtcttgaactcctgacttcaactgacccactcatcttggcctcccaaagtgctgggattacagatgtgagccaccatacctggcctgctcatgagggatatgtttcgatctgcagtcaggaaaaccaaccctgggcctgtaggtgcattaggaggggagatcatggacaacgtttattaggatactcagtgacatctttctcggtacataatgaaagtgttaccaaacaccggacaagttccctaaaactgttgcccaggctctcccaaggaattttggaaggagattctgtctgtcagggacagggtggtctctgaagtggatttgccaggattcctgatgacacagggtacttcttcagatatacgttgctcccatggtggggagtggctgtttatcaccacgtgcttagaaacatgtccattacttaaggattagagctaaagaaaggtgctgctatcacagcacagcaagtctttggattctctagctaaagttgtttagataatgggatagcattagattacctgctggctgaacaaggccaactcctcctgtttgtcttatattaacaccttggctgaagttgaagttgaaatgcaggtagataaaataagagagcaaacttcatggtggcaacagataaaaagaagattaactaggattaggtgattggtattctggattgttttcttggatctcacaagggatccaatctgtattttctggtatcgttacatttggcttatttctcttatcgttattgtaagttatgttttcattaatgtcatcatcaaatatagattaagatgctgctccaagactacaataggtaacagtacccagataatggaattgcagtatgcaggatatgggcccggcccctggaaatactttcaacttcaaatggatagattctgctcttcagtttccacacctttgcccctttttcagcaggaagtagctagaaaagaatgacaccccttttcctacatgaatgaggaatggaaaaaggcagtggggatttgtaacagggccccttgagatctcagcatccaagcatttttagtgactgaaataatgaaaattctgatcaggcccttgtttgcttgaacttgctttttgcccaatattccttgttcccacaacataatgataaactgctgatgtactgtttctctgtcaagcagtgggagttaacttcagggtcacaaaaaaagtatccaagaagaaataaatgtctttaaggatgttgtgacaagctgctgactcctagaagtctggttgtttcaggtgttatctgagagtgaagaaacacagacttttcccttggtttcctgaaactccccctctcttactctgcagccacataactctctgcttctttttcttaaggtaaatcggagagatcttgccttgaccaaattaaataaacctttctctatttccaagcacttgtgtgtcagtgttggcatcagctgtacgttcggtacaagagcctgaatttcggattctatgacaagattgggtggttaatgcagatacaattgaattatagagacaatgatcacattttctgaatctcaaggccagatagttctggtgtttcatgagtaggagacagagcttaaagccagtgatttaggtgttgagcaattcaggaatttctaggacattttggtaagacagaatatctgattggtgttagccatgatttaggtgttgagcaattcaggaatttctaggacattttggtaagacagaatatctgattggtgttagccatggagaatgctccctcttgtgaaatgttgagaagggaagagagagtgagggtgggtggtatggagccaggggctaggaatgaggcaatctctcttttgtggaagtcctcagtaggttggtgtgactgctgctctccaacctggaaaaagaagacagcggccatgggagacatttaggattttgtctcaggttcttcccagagatgatccaggaatcctgcttcccggtgttctccacaaaagggagatgtgtttgttgccttgccagcataacttggtgttttaaaatttttctgatacaacctttaactggaaatcagccccatgggggaaatcctgagatccatgacagagtgaagcatagccattataaccagggactttgcaaatatactgacatgagctcaatgaccagctctgccactttccagctgtgtggccctggaaacattactgctctgttttatccttggttcctcatctaccactgcttcctaaacttgagtgtgcccacaaatcacctaggaatcttgttacaaggctggtcatgagattctgcatttctaacaagttctcaggtgacctggaagctgcctgttcctggagcatgccttgagtagtaatctgatttttagggttaccctgaggttaatgtgtattatttatgaagagcttagcatggagcctggcataatggtttggagttattgttcctcgggcaatgggaagcagctgacttggactttgggggaggactctgaatcagagtggtaagtaagggacagtgcccacatgaatgccccctcttcaattctgccctccatcccagaggaagtctggaaaaattatggattggggggtttacaatgcaatggaaaaggccttttggtgggaccaaggatgcctctgttttgttcccaacctgtgatcttaaagaagtccctccgcatctatgggccctcttgaaataaatgaaagaaatgattcctgtgtttttctcctctctctccaagttgttgtaattggtgttgcttaaggcaaaccaaaagactctaggaccagggctcttcactcctctccccatgtagcccttggtaggaagatgtggttgagccttagtagataacagctttcataaaaattcactttttttttttttttttgagaccaagtctcactctgtcaccaggctggagtgcaatggcacggtctcggcttactgcaacctctgcctcctgggttcaagcgattctcctgcctcagcctcccgagtagctggaactatgtagtgtagtagcatgcgccaccacacccagctaattcttgtgtttttagtagagacgtggtttcaccatgttggccaggatggtctcgatctcttgacctcatgatccacctgccttactcagcctctcaaagttctgggattacaggtgtgagccaccacgcccagcccactacttttttttttttttttttttttaattaaaagtgtccttaacatcttcagtttctccccagctcccctttcttccctggtttctgttgtttccttgtttcttatttcacaagaccagaaatcccctccttgtccaatgtaggcccttccaatgttgtacccgaatttccaaatccaccctctctgtccttcaaaacctttatctcccagtgggttaagcagtaattcatactaaggtgtgaatggttgctctaaatttccccagtgtatttgtaagtacgtgtatgttttaaaaaggaggtcttgagattgtaaacatgattgcaacatttatagaatttcaggcacagagatgaagcacttgtaggagcacatcagggagaataaatgtgggggtagaggaatgaacctcttgttcacacacacacacacacacacacgcaaatgccttctatggccctcagagcaatcccgaatccatggagggctgtgttcttgttagaaaatcaggtgaacttgcagaatttctcacatttttctttcctcaaaaagttgttgctgttgcctccgcagcctccgtaagcaaataactcacattcaccagtttcaaagttgaaaaaccatcgcgtcatgtaggtttgacaagggcccttttccataggaaaagcgcatacatttgggaggagatccttgatagtgtctgaagagagaaagtggttgaaggagaccaaacccatcaccttctccttgtttgcctcatatgccaggggctgtgacagccctgggcacaattgtgaggccatccacaatggctgtgctctgtacctctttctacccagctatggtctgatctgtctacacagaagttgacattttcacttctgagagtagcctgatgtggtgataatcataggcttgagaatataactcaagtggattgagatcctcgcgcagccacttgctactgtgtgatgttgtataaacctaacttcttcatgtctccatttcttcatttgtaaaatcaaggagttgaaccacatcatctctgagttcccttccagatctacttttataggatttgataataaagatcctcaggtttctacctcctgtctcataatcaattctagaatcaatatcctatgagagaaggaggacagactttgaatctgagagcaagattgaatctgagagggttcaaacttgtctcaattatcttctagctatgtgatcttggacaaatgacttatctccttgacattcaatttccttcattgcaaaaatgcaggtgtaatatccacatttttggtttattgcagggttagagattaccagtgaaaagcattgataaatagaaaataaatcaataaatagtagctgctcttaatcattctatttcttaaccaataagactcttgagaagagggacctcattgtactcatttctgcagccttagtgcctaacacaggcctagttctcagttcttagcaaatatttgttaatagaaaaccaccaccaccaccccactgagcccctctggggcaggattaaaagtttctttgtaccctccttttatgtttctgtcaccatgtgggcagttttactcttcatggtagctagtagaatttccaacattatgtgaagaaactaaggccagataaatgaagtacctgtcctaatgtcaggctaggaagcagtaggaccaagaatcaaacccagcatggttcgactgcaaaggcttgcaggttctccatccatcttggttgttgtaaaatgagtgaatgcacagatgaatgatcacacctatggtggaacttcaggcagcagcctagggcttggaaaggttcagactctgtcttatcctcctacctgcaaggctgacgctaagggtgcaggagaatggggaagaggcagaatagcttattcaatccaggtgggaggtggaggggcatgttcttaagacatcctagtcactgcatcatcggcccttagacccttacaggtgactctgtaggggctggagtcccatctgctcttagttttctcagtcttgcttctctgctcttccattccattaaaccaaaggaaaatcacttgacttgcttcttttttatgtaaagtagataatgacaccctgtgtgtgtgttttgagtgtgacagaagctgttctaagtgctttacaagaatctattaagagctaagttatactgagagcttgacatacatcagactatttgattaataaagcagaaaagatggttaatctttttttatagaagaagaaactgatgctcagagaggctataaatgatgttcctgaggcacagagtttgtaagtagaggagcctggaccagaacccaggtgtgtctgactccaggaatgctcatactgtaaaccactacattcttcttacttatggcagacattttcaaacttgagtatgcgtcagaatcatctagaaggcttgttagagagacccacctccacagtttctgatcaggtgggactgggaactagcatgtttccagttgatactgctgctgctattgctgtcagactaggggacaaactcgagaaccactcatctataaggttattgggaggtttagagttccatttatgtctaagaatctatcattaatagctccatgtacatacatgcagagaactatgcttgcacatgcaagaatgttcactggcacattgacagtgataatctccagagggtaagattttgataatttttcaccttctttcttacccttttgtgtattctaatatgcatttttatacagggcatcctactggctgcttaaaaatcttggaaactgctgcctaccatccccatttccagcagattatcttagctataactgcacttcatctccccacttccatttgcagattccaagcttccacagagaaagtggtccaggaaggagccttttctgacaagtgcatctaacttggctaagtccctcactctcaaattctggctctgatctccttttcccaacctctccttgcctgccaccagccccaccccagacattgaaggccccttttcctgctttacttatttcattttctatagcactttgatcatctatcatttgtattaggtattgtatgtctctctcccattagcatcttaatttcacaaaggcagggtctcaggctctttgctttaacctcagcacctaggacagtgcctggcacataactatgtgcccaacatatgtctgatgaagtgaattgaactgaattgactctcaatccggtaaggtaagaaatgggctctgtttgtgctgcatcacctcccccaccaccccgccccccagcctgattcccagtctattctttgagatcccacatttcataccaacctcgtgctagttctgatcgaagctctaggcagagagtgagaatcaggagaaacgagagagaggcctgaagctgcatggtgccactcagccagtggctcagcctggggttgccattttagggagaaaagggaccaaggggaggagcctggccccacatccagctcattcacctttaactcaggcttttcatggggctgggctgcctcaggaacagagtgttcagccaaagcacagcttcacctctctcctcctggccttatctgatctggccacccaggctactttagtaccacttcagggtggaagcctttttcacaataataaaaagacagcagccatttttgagtacctttccttttccaggcaccatgcaaaatagttttcacacattgcttcccttaagtctacacgggaatcccacaacactaacactcccattttgtagatgagaggaggttatgctactttgaccattgttacatggacagcaagtttcagagacaagactgagaccccggtctgtctgcttcagtgccctcgtatcactcattcattcaacaaacattcatcaagtacccacactgcaccaggcaaagtattagatgctgcctccatcccatctgggtgctcccaggaaattatggcaacaacacacacaaacacattggaagtcagaaacagtcacctacttggaggaggagcagattcattatattttaatagaaatatcaaaagcaccatgtagaaggagggcccagctttgtttgcttcagagggtcatggtctctagagacacacccccagaatccagcacattccaactgtctcctttccttgactctctagagatccattttttttgaaagacaaagccagcatgctttagggagatttagtgagcctcagatttaaaatttgaggttgtgatgggtccagctattctttttcaagaagcattctatcatatatttattattatttatttttaattgagaaataaaaattgtataaaggcagtccccaatttacaatggtttgacttacagtgtttgactttatgatggtgcaaacacaatgcacagtcagtaaaaacagtacttggaatacccatacaaccattctgtgttcacttttagaacagtattcaataaattacattagatattcaacacttcattataaaaggggctttgtgttagatgattttgcccaactgtagactagtataagtgttctgagcaagtttaaggtaggtaaggctaagctatgatgtttggtaggttaggtgtattaaatgcatttcaacttctgatatcttcaacttaggctaggtttattaggctataatctcatcataagttgagaaacattatatatttatgaggtacaatatgatgttttgaaatatatgtgtgtatatatatatagagagagagagaaattttctctcttagcaattttcaagtgtacaatatgttattaactacggtcaccatgctgtgcaataggtctttacaacttattccgtctgtctaactgaaattttgtaccctttgaccagcaccttcccaatacttcccacccccagccccgggtatccaccattctactctctgcttctgtgacttcaacttttttagattccacatgtaagtgagatcacctggtatttgtctttctgtccctggcttatttcacgtaacctgcaggttcatccacgttgtcacaaatggtaggatttccttctttttaaaggctgagtagtattccattgtgtatacataccacattttctttatccatccagtgacggacacttgggttgatttaagtccagctactcttgacctgggcaagtcatttaacgtcttccagcctcagttttctcatctataaattggggttaattatgttgctttagcatacttcccagaattggtgcaagtgttcaataaatattcaaatgcctcacacattgtgaatgcacacacaggtatatgtcttttgcaagggatgcgtgtgtgtgtgtggcaatgatgcctttttgaaaatgggggtgctaactggatcagcagcatacttagttgctacagaaatgttttccccatctttgcacattagttatagctcttccttttctttaaattccctagaaccatgatactcattccttggccattgctttctctaactatagcttatacaattgttggtcgatcctctcattatctattgatctttgctgtttaccccacatttatttccttgaaggcacttctgaagcctacattgcaacatctctttggtataacttcttttgcactttgaggggtccaccagcattatccttgatatcgcctttcttagccctcttgggtgatcaaatctgttcatcagaaaacaaaataatgatagaaggaagaaataaatagactgtcacttgttgtgcaggcagaggaaaggcgggggcgcctattgatgatccttggctgagagcttcctgcagtgttgcctcctctggggcaatggatcaggaagtgagaagctgcctttaaacgtactattcaggaaagcaggggagggagtgatactgcccccaaggacactcggcaatgtctagagacatttttgattgggggcatctactggcttctagtgtgttgaggcagagatattgctaaacaccctatactgctcaggacagccctcacatttggcatcaaatgttaatcttgccaaggttaggaaaccctgcagaagagcaatagatacaaacacttttttaaaaaattataataatatttccaacattaacagcatgataaggatccagtgcagtgaggggcagtgcctgatgaggtgtgtctgtactcgtttggccaaacaggccttgtgggaaggtgcaacaggacctggcccttgaaaagctcattctgtactcaggttgccctggggatctttggtcatgactcagtgaattggctctttctcaggagatctgggtggcagtgttattgtaattccagaaaggggagggcaagtgtaagatttattaaaaacacgttagagcagctagaaggcagccctagctagttatctagcacttatattcattgcaggaatcttactaaccctatgtcaaccatatgtgtgtgcatgtatgtgaaaaatcattacattatttttttaaaaactttaataaattcaggagctacatgtgcaggtttgttacatggacatattgcacagtggtgaagcctgggcctgaagagtgaatactgtacaccataggtaatatttcaaccctgctccgcttccaattcacttactactttttttttttttttttttttttgagatggagtcttgctctgtcacccagtctggaagtctggagttcagtggcgtgatcttggctcactgcagcctccacctcctgggttcaagagattcccccgcctcagcctcccgagtagctgggattacagacgtgtgccaccacgcctggctaatttttgtatttttagtagagacgggctttcaccgtgttggccaggctgatcccgaactcctgacctcaagtgatccacccagctcggcctcccaaagtgctgggattacaggctagcgccaccgagcccagccccaattaacttacttttgattgagacccattaatttggctggtttaaggaaggaggaagtaaataagggtgggattttgaaagaataaagtttcacccttcaggttctaacctccaaatgacctttctcttttgtagaaggaagaaggggactaacatcttatgagcaccatatgtcaggcaattcatttaattctggtaaaatatagtaacgttgcaccagtatagctctatttcctgcccctcctttgtgcttttgttgtcatatatattacatttatgtctattatagcattgttataatcaagagaagaccacatacacacacacacacatacacacacatgcccttatatacacatatacacacttttatatttacatacttaccatttctggtgtttttcattccttcctgtggatccaaattaccatctgggctcatatcctttcagtcttaaggaaaaagtctagtccacgagaagcatcacctcctctcagtttttgtttatatgggaaagtctttattttgcctatattttctttaattcaaatttttattgagataattataaattcacgtacaggtgtaagaaataatatggtttcccctaatgttaacattttgaaatgtttccctagtttcccctaatggtaacattttgaaaatgggatatatatatatatacacacacacatatatataaattctttttactataaggaattggctcacatgattgtggaggatgataagtctaagatctgcagtcagaaaggtggagacccaggaaaaccaatggcacagcaccagtacaagtccatgggattaagaactgggagagccaatgatgcaagctctagtctgagtctgaggacctgagaaccaggagagccaatggcataagttccagttcaagtctgagtgtggagacaaccagtgtttcagcttgaagccaggtaggcagaaaaaatatatatttcttactcagacttttatttcattcaggcctgcaacagactggtcaaggcccatccacactggggagagcaatctgctttactcagtctaccaattcaaatgtcaatgtcatccagaaacatccttacagacaaacccagagataatgtttaaccaaatatctgggcaccccatggcccagtcaagatgatacataaaattagccatctcaagtccattacttgtcaacctggcacccatacatatctccttagactatacttaatcttaaaataaagactattacaaggttataatcccacctaacatgatacaattatcctgcagacaatggaaatacaccaacccctttcccaaagagaacatagtttttgagtgacgtttactcctcttgatatctcatagcttaaaattctatgatgtaaaatgaacaatacttaagtactatgaaataaagtcaatacatcttatgttgcataataaggaaataggaaagggaagaaaacaaagatatttgcttaatacacacccatattcataacaaaataaggaggactactcatgacaattacagtttttgtttctgtaatggtcacgtggtcatagctggtatttataactacttttccccactacccattctgtattgcctttgccttcagcaagcacctcatctggtcattgttctttacctgggcaagtgacccaaactttcattcttgaagggtttgggccatttgctaatggtcctgcctgggttgggttgtagttttccattggccttaatcaaagggcatggtaatattaagagttgccccaaggaatcttccgtattccggacacactcttcctttacctgtattgtgcagtacttcaatttcccccttggtagtctggatcaataaccccagccaacatagtaatgcctttctttgcctattaattcagaggcaggaggagcccaaagtggccagatgacagtcttaactttcagttcagtggaatcattgttggttctctttgtgaaagcaggcctccttttggaactgagacttctagggaagcatagaataagatcatgggaataggaagcaaaaattttgctagtgggtcaccagggataatagtgaggaatgcctactcccatttccactcttttattcctgggcacatgaatcctgactatgggagaaagggtaccatatattggaggctgattcagagcatctacagcctgcaggaaaaccttgccccccgtcctgcaaggtactatcaaaccagctgcttcaggatgctgggaaatacaataagatcagtgaattccatgagcacgggcctattgctgtaattttttttttttactgtgacatcagttccttgataagaaacaacactgtgtgaaatactatgacagtggataaggcgttccataagtctacagatggtagttctggcagaagcgttccatgcagggagggcagattagtgttcagagtaagtatctattctagtaagaacaaaacactgacctgtccctgatggaagtggtccttatctgttgtcttaccttcctctttccctccctccccaccccctttcccatgcccacacactgcccatcaatattttttaaaagctccccaaatgattctaattttagcccaggattaagagtgattctcctctgactttcacatctaataataacccactagaggaatgtttgcctctcatcctcccaatcctgggcttagtgggattggtggtcttagtgctcaagggaggaatgcttccacaggaaaatactgttgggattttgcagaattaagagcaaacactgccccttggatatttttggctcttcataccacttaatcaaaagagagaaaggggagggtgtcactgcacaagatgggtggttaatcctgataaccaaggggaaattgggttgctgctatacagtggaggtaaggaagcttgtctatatactagttctcctgagaaacagagccaatataagattatgtgtgtgtgtgtgtgtgtgtgtgtgtgtgtgtgtgtgtgtgtgtgtaattggctcatgcaattatgtaggctggaggtcaaaaagtcccatgatctgtcatctgcaaactggagacccaggaaagttggaagttggtggtgtaatttagtctgagtctgaagacctgagacaagggtgtgaatctttgttcaagggcaggagaagatgacatgagatgtcccagttcaagaaatgaggcagaaagacgggacaaatttttctttcttccatcttttgctttattcaggtctcagtggattggatgatgcccatccactttcaggagggccgtctactttactgagtccaccaattcaaatgctcatctcatccggaaacaccctcacagacaaacccagacatgatgtttaatctggatattttggggcccagtcaagttgatgcataagattaaccatcacaacctagaacccaagggattcattggcacctcttagaactcctttgtacaatagtcttgatcaatgaaaaactgtgggaaccccataaaggaaagattgtgaagggctcagactgcacaggaatgaaagtttggatcacctcgtcaggtgaagcactccatctgactggcagaaggtaatggaaacatagaaaggatgccaggagaaggcagctatggttatcaccttgaacttcatgaccagccacacagagggggtctgtagtcgctgttttatgttagttgtctctttcctcccttcttccacaattgaatatgaggaacattggtgatggctagcattttagcttttgggtatgtgaccaactgacacccacaatgatttggtgaccaggaggactcatgcaaccccgtaatgggacatggacttttcatgcggacagaacccaagagtgaatgttgagggatggatttgaatttctttctttccccttttgaacctacttaccccctcttctgtgccctgctttatacctcagaaaaccaaatgtatgggttgtatcaacggttatcttgctttctggcttctccttggaaccagcccatggggcacagagggagattagaggaaagactgggactaaggtttgggtatttattccccatcttcctctggttgtgtctccacagtctgcatggatgcctcaatttgctcctttcaggataccccttccatatagatctctgttccagtaaccagcccctccccttggtccttcacattaaggggtgttttattatacgatgcatttccattcattcaacaaatatccattgaagacctctcctgtgtcaggcactagtaagaaaaaggcacaacgctttttcctcgtagagcctaatgtctagaggggagagaaacattgaataatgtcacaattaaatacatacctacagattatgataaaagctatgacagagttaagtacaagatctgcgatgaagatttgaggtgaagggaatccacacatgtggaccagcacatgtgagtgctttgggggcagtaaggagctcagtgtcagctttgctgacagtaagagggagagaagcttgacttgacaaggtttctcagtgaattagctctggggagggagttgtgggaaaaagaggagactccttagacatgaaaagtaaagtacattggagttaaacatacttttggcctctccatgtcctccttttactttactgctgaattgaaagaacaccgaagatgtgctcattttgcttgatgaattaatatgctaaagtaggcagtaaagaggaaatcagtagcagggagagaaaattgtgcaaaaggacagaaatgatgaatcatgaatgatgcactctctactggacaatacttagcagaaatagcaaattaagaaggatgggtctttagaataaaagttaatagcagaaggaagcaagaatgtgcaaaattatgatgaatcagaagttttgtgacctacatttaataatacttttcaggaatgtgatattaaatcaggagtattagaccagtagttcccaaactcacacggcatcagaattaccttggatcttataaaatcatgttgtatactttaaatatacacagtaaaatttttttaaaaaggaacattatatagaatttacaaaaaagacttaccttgggagcttaatttatttataaagtttagttttttgggaaggctctagaatctgaattcttggtgtactggtactagtgagctactgcctcaggtgatttggctaaaaaaagaaatccgtggcttatcaatgatagacaatgtattaaacaagtactgaaatgcatgcccattttcttcagcatctgctgttgttatatgacatctgagatatcttaggacagcccaggtagcagtacttgttgattttgaaatgtaaagctcactgaatgggggtagaaatttccctccaaacacaaaacccaggtctcgatgacaattaggtgggctcagttctcccttccccatgattcagctgtggagtgcagctggtctgacaagaggcaggtgttggcaaggaattggatcctgagaggggtgtggtctacagtgttttgctggatcttctcttcctctgggtaagacaacttaccccaatcctcattgctaccaccactgatatctttatgaaagtccctggggttggggggatgagagccaaggaagtgccacaggcaagtctgtggtgggggaagcagttacccctccaggctctggatgcttcttgttcttcaaaccagctgcatggtacctcctcagagatgcagctggccatgcctccccacctagtggaccaagtaccatttgatccctcagaggtctcaaccctggctgcagaaattttagaagaagagtgccagtcacacagctcccacctctctgttcccccagaggtgtgagcactatgtgtgcctgggccccttgtcttaactcctgggttctggtaaccccaaatcttttatactcccaaatctaggagtgagggattctaatattcatgtaaccaattctcagtattaaatcctctctgagtgaaagcttggctctttcagttcttatactgggaatactggttttaactcccaccaagacttccctagtagggagtcctagtaggaattagatttaggtactgaatattaaaaatcgaaatcacaaatagtcactatatccatcctgatttccaactagtctgtgggatctggcaacactttgccacccttcagacctggttagctccagttttgttactcatttgctgtgtgattttagacaagtccatttcccctactagaagcttccatttgtgtatgtgtttttaaaaagagagggattggggctgctggagttttctaggcccctcagcttagacactccctgcatttccaaatgatttaagcttcctctgggcatttttggctctggagacagctccaaagagagaagaaggagaagaagacgagaggtcctggatatgcgtggtaccatgggaaacacctgaagattccacttgagatgtcttctgggatctaatggacagagtcatgagcaaacagtcagtgataaagagacccaacgtactccagccccactgaggtcttgcaaggcaggggttctcagtgctcagccctgagggctttgagttcattcttgagcagagcagtgatcagatactgctcaccacacggcacattctgaacatttccaagggcctctttggtccatgggtgtcggggacagaatgattctgttccattcattcatgtatgtcaaccccaatcaaggattgaagagtgccagtgagaaggacaagcactaggtgcttatcagatttggcagagtccttgagctgctgtattttctcaaatttagaaatacactttgacatcattagtccatcgtcttcatcttagaaatgcaaaactgaggccccaaggggagcatccctccaccctatcctgttccaaccacagcatacattcaaccaggggtaaagctgggattcagatttggatctctttattcccagacacgtgctcttcccataggatgcagaccaaagatgactggttagtaatttggtctgaatcttaaggatgcacaggactgggataggcttcccgggagcaaagaacaattctcacagaggtatggaggcaagagcaaatgtcaacatggggagataccacacatggggacaatgtggctggacagacactttgcaaaactgccaaatgagcagccttttcagggtcttcatcacgaccctgacctgaccctcccacttccaaggattctaacatcttcacctactctccttctacaccagaaacaggcaccatagacttcttttgttaatggcaagacatttgtcacaattttattgtaatcactcagaatattccagaatactattgatcttctttcatactgtggcaaacactttaaaaacattatgtcttgtctatttggggagttactttctaacaattgcattaaacctcattttcggccgagcacggtggctcacacctgtaatcccaacactttgggaggctgaggcgggcggatcacgaggtcaggagttcgagaccagcctgaccaacatggtaaaactgcgtctctactaaaaacacaaaaattagccaggcgtggttggcacaagcctgttatcctagttactcaggaggctgagacaggagaattgcttgaacctgggaggcggatgttgcagtgagccaagatcgtaccattgcactccagccttggtgacagagtgagactctgtctcaaaaaaaaaaaaaaaaaaccacctcatttttctcagtaattatttggacttagctgtaaaatttttaacagatttattaaaatatcattgacatataaaaaagtatccatttaaggtgtaccacttggtattttgatatacatatacattatgaaatgatcaccacattccagctaattagcatatctataatctctacatagttaaccatgtatgtatacgtgtgtgttgagaagatttaagatctactctcttggtaaatttaagtatacaagacagtattgttagcaatccttaccatgccgcacattgtatctctagaatttattcatgtcgtatgattgaaactttatcccctttgatcaagattaccccatttccccctcccaccagcccctggcaaccatcatcctactctctgcatctaggagctgtattattaaaaaatgctaagagagtagattttaaatgttcttgccacagaaataacttagtgaagtaatgcatatgttaattagctagatttagccattccacaatgtgtgcgtgtgtgtgtgtgtatcaaaacatgttatttgaaaaagcagtatgtaggggaaaaaatcatgttgtacacaataaatacatacgattttatctgtcaatttaatgtaaatttttaaaaattctacatataagtgagatcatgtagtatttctctttctttgtcttgcttatttcacatatcataacgtcctgcagttccattcatgctgtgccaaatgggaacatttcctttttattttttaaggctgatattatcccattgaatatgtatgtgtgtattttattttattttattttattttattttattttattttatttgagacagaattttgttctgtcacccaggctggagtgcagtggcgcaatgatagctcactgtagcctaggggctcctgggctcaaacaatcgttctgcctcagcctctcaagtaactgggactacagacacgtgccactatgcccagctaattttttaaatttgttgtagggatgggggtctttctatgttgcccaggctggtctcaagctcctgggctcaagcaatcctcccaccttggcctcccaaattgctgggattacaggcgagagccaccatgcccagcctttttctttcttttttttttttttttggttttcctctttttttttaatttcattattattatactttaagttttagggtacatgtgcacaacgtgcaggtttgttacatatgtatacatgtgccatgttggtgtgctgcacccattaactcgtcatttagcattaggtatatctcctaatgctatccctccccactccccaaaccccacaacagtccccgatgtgtgatgttcgccttcctgtgtccatgtgttctcattgttcaattcccacctatgagtgagaacatgcggtgtttagttttttgtccttgcaatagttggccttcatctgtcaacagacattcaggtcgtttctggacttgccgtgaataacgcacagtgaacatgggagcacagctttctcttctcagtcctgacttcaattcctttgggggggatttctggatcatatggtagttttagttttaatttttttgggatcttccatattgttttccataagtagctgtaccaatgtacattctcaccaccaatagtgtccaagggtgccctttttctaaattcttgacaacacttatcttttgtcttttttatgatagccatcttaacaggggtgtggtgacatctcactgtagttttaatttgcattttcctgatgattagagatcttgagcacatttttatatacctgttgaccatttaaattttttcttttgagaaatggctatttaggttccttgcccatttttttcagcttcccaaaaattgttggatgtccatttgttaatcaggttacttgtattcttgatatgtattcttgaatagtagtcgtgtgagttatttatgtattttggatattaattctttacagcatatatggcttgcaaacattttttcctactcagtagcttgccttttcattttgttgattgtttcctttgctgtgcagaagattttagtttgatataatcccacttgtctatttttgcttttgttgcttgtaattttgatgtcatgtccaaaaaaaattgccaaaatcaatgtaaagatgattttttcttttatctttttctaaaagtttttatttttctccccctagctttattgaggtataattgacaaataggaattgtatatatttaaggtgtgcaacttcctatattgataatgtataaaatgatcgccacactcaagtgaattaacatatacaccatcttacatagttaaccttttcttgtgtgatgagaacacttaagatccaccctcttagcaaatttcaggtatgccatacagtattgttaattgcagtcaccatactgtacattaggttccagaactaatttatcttgcataactgaaatggaaactttgtaccctttgaccaatattttctcatttttctccttcccccaccccatcaccccatcctccttgtaattaccattctactcactgcttctatgagtttgactattttatttatttatttatttatttgacaggaactcactctgtcacccaggctgtagcctcaaactcctggcgtcaagcaatcctcctgcctcagcctcccaatgtgctgggattacaggcatgagtcatcactcctagcccaagtttggctatcttagattccacatataagtaagatcaggcaatatttgtctttttgtgtccagcttaattcacttagcatgatgtcctttggattcatctgtgttgtggcaaatgacaggatttcctactttttaaaggatgaatactattgcatgtgtgtgtacacatataatgtatacatatattgtataatgtatatatacgttgtatatatatgtataacgtgtgtatacacatgtgtgtgtatgcatacacacaccacagtttttaattcatttatctgctgatgacatttaggtttttttcatatctttgctattatgaataatgcttcaatgaacttggaagtgcagatgtctcttcaagactttttaaagaattttagtttcaggtcttatgtttaagactttaatctattttaagttgacttttgtatatggtattggataggggtccaatttcattcttttgcatgtgaatatctagttttcccagcaccatttgttaaagagatcttctgttgcctattgtgtgtttttgacaccctcgtcaaagatcaattgaccataaatgggtgggcttagttctggcttctctattctgttccattggcctgtatgtctgcttttctgtttttatgccagtaccacactcttttgattactctagctttgcaatgtaatttgacatcaggaaatgtggtgcttacagctctgttctttttcaaaattcctttggcaatttggggtcttttgtggttccatatgaattttagcattgctttttatgtttctgtaaaaaatgccattggcattttggcagaaattgcatgtgctctgtagattgctttgggtagtgtggacattttgacaacattgattcttctaatctatgagcatggatgtcttttcatttatttgtgtcttttaaatttccttcatcgatgttttataattgtcaatgcataagtttttcacttctttggttgagttaattactgagtgttttgttgttgttgccgctgatggaaatgagattgttcttggtgtataaagttgctattgatttttgtatgttgattttgtatcctgtaactttaataaatttgtttattaattctaacctttttttgcagtgcctttagagttttctacaatcagttttaccagccctttctaaagagagggaagcagagatggcaacagcatcaacagcaaatgaattccagcctctttagagccccttgatccaagttatattaaacaacaaacttatttgacaagagatagcaagtcttggtgtgctgtgatgacaagctgcctgttgtgaggttcccttctcaagcctggcatcctcttatcttgcccagtcctatgggtgtctctttcttctttctctctccctatccttccttctactcccttttcatcttttttttctttctttttttttttttgagaccaaatctcgctctggagtgcagtggcgcaatctcagctcactgcaacctccgcctcccgggctgaagagattctcctgccccagcctcccgagtaggtggtattacaggtgcccgccactatgtctggctaatttttgtatttttagtagagacagggttttgccgttttggccaggctggtcttgaacttctgacttcaagttatctgcctgccttggactcccaaagtgcctgggattacagctgtgagccactgctcctagcccgtttccatctttgatcacctattctgtgaataaattttctgaaaacttagcactttaaagcaaccattttatattgtgggtcagccatctgggaagcaatctgcttggtggttcttttatagggtctttcccatggttgcagtcagatgtctgctggggctgcagccatctgaaggctctattgggttgggcatctcatttgcatggctgaaattgatgctggctatcagtcagagcttatctgggcctgctgatcacagcacccacatgggtctctctagcatgggcctctctcagagtagttggacatcttacatggcagtttcccactgcccccaaacaagctacataagaggatcaagtgggacttgcacttattctagcttagccttggaggtcacatagcatcatttttgctttattctcttggtcaaagcagtcacagagttttctcagattcaaaaggaggggacatagatcccacttctaggtggaaggtgagtgaaagaattttaggaccttgctttaaaacagtcacaccatccagtgtcttttcctccttcacccctttcttctcccttcctctttaactcttctctgctttcctccatctccccctttcatgcctgtccagctattttcaattttggagtttctgcaccatactatggaactgtcttctttactacaactccagtaaacaagtccatgagccctttcagagacggacttaccatgaggtcgatggagccaagcctcagggtcctcgctcgagcgagccccttttaagattctgggagtgcttctagctatatgtttacatggtcagatgacttgtaatatctgcaaaagtaagatattctaaccataatcgccaatccaccttccctttccactctgacctttccctctgtcacacttctcctaggtcaggtggtgtttgggcgactgccagcattttaggcatgcaaattaaaaggaagttgagttggggatatatttattttggagttagtagaatatatttaggtcgttagctgtcatttgtatgtgtaggaagttgctgctagctgtcctggtggagaagcagctgcaaataatactcctgttttctactgggcctattcccttgatgttatgacactaagttatgggactagaggttgcactgtaaaatgaatgttcttagcccaagaaggttgcgggtggtagaggagaaacaagttttgaaatgtgtggagccaggaaaacaagcctgtgtagcattctttcaaatatcagatacatcaattttttttttgagatggagtctcactccaccgcccaggctagagtgcaatggcacgatcttggctcactgcaacctccacctcccgggttcaagcaattctcctgcctcagcctcctgagtagctggggctacaagtgtgcaccaccacacctggctaatttcttgtatttttagtagagatggggtttcaccacgttggccagtctggtcttgaactcttgacatcaggtgatctgcccccttcggcctcccaaagtgctgggattacaggcatgaaccactgagtctggtcagatacatcacattttaattagaaaaaaaaaatcagctcttatggaagcctgttcagaagttcttttgtagtaagcatatacttgataattcaatatgtacaattttaaatgtaccatgcattttttctttttttaatagagttgtacaaaagataatttattaaaattcctgtgtttctaggacacaaacctgtaacagaactgcagacatcaagcatggcttcaagcattcaggtacatgttttatccaattcacctataataaaaattaaaatatcatattttgatccccacattaaataaaaagttatctttccattctctccacagaaatagtgctttacagaattgaggtcataaatgtaaacaatgaattattaatttatatgggttttgtgcaatttttactgtttgtcagcctttaaaaatttgcagctggttgcaatttccctcctcatttgaaataatattctcttttgtactcatttgtgcttggtttctttcttttttcttttctttctttctttcttttttttttttttttttttttgagttttgttcttattgcccaggctggagtgcaatggtgcaatctcagctcactgcaacttttgcctcctgggttcaaacaattctcctgcctcagcctcccgagtagttgggattacaggcatgcaccaccacgcctggctaattttgtatttttagtagagatggtgtttctccacgttggtcaggctggtcttgaactcctgacctcaggtgatccgccctccttggcctcccaaagtgctgggattacaggcgtgagccaccgtgcccagcctgtgcttggtttctaaaggagctcctcatttatcaggtttagaccatacaaaatctggatctgcactggctccattcttcagcatcttaacgacaactttaccaaagtaacaatgtcactagcattctcaatttgcaggattttcatactctctcccttttttggtgtcaccagaaaatgcaatggctttttgttctctgaaaattgcatatagagagatgtgagtgtatgtcaatatcagcatattgcagatgtgaattattcagcctcggagagatcggaccccacagagcactttattaaggcaactgaagccttcatacaaataaatggggggtctgaaagttgaagacatagagtttcatactgagaagtggtcaaggggaagagcattgtgtttgaagagatgctacgctggaagaaagtgtgtaagcaattcctggggttcagtttctggaacagccaaggtttggcccgtggaagccaatttggagcatcaatcaggcacacgtggagagaggcctggattatgagccaaatcctggaggttattcaagctcctccttatggtataaagtaaggctgacctgtgaagcagaagaataaagggtgagatgcttggaccctgaccacattaggaaccaaatcttgcacctaatgggaaaaaggaggtgggatcatttttacatctttgggcaggaatggaatgaaggtgagtttgggggctcctagaatgatcatgagttctgacttgtccagtagagtcccagtttatgcctgttgtctcagtgtaataattaatggcacctcaccttgagacactttcaaaagtgatttggtttggccaataaagtatgtggttgccctggttagaaataacctttcaaaggaagagaagtagcaacaaggtttagtgagaagtaaaggactataatgattggctgatgaatggtgcccagggctgggctgggtttaccgggcttccgtctgacctggtctgggatactccaccacttctgttttctctctacacccactactcacctcatacttgccaatatccctttgactaatccctcccttcccaccctctttcccaaaatatccttctacttatacttctgcattggagctggttttgtcatccccagcgccacccaggtcttggaatagaccagccaacacccagacctcccagtgtggccttggtgagcacaggagaccgggacctctgggacttatggtattttttgcaggtgaccagacagatagcttcagtttggaagttgttattgttcccctggctaccgccatagatgaattcggagcagatcttagttttttttattgtaccaccagtgtggtatggaggccaggcaggggccagcctcctgtggcatactgcatatatctgcagggagatcgcagaatagagctgtttgggtgcctgtctccctggagaatgtccatctctccccttctctggccaccattccctttgtctccactgagaagcaaatttgcctcagggctctgttcccaattcagtgtgaaccctgaccactcattttacctctctggtccttgacttcctcatctgtaagatgagaatacaaaatcccaacctgctcgcctaacagggctgttggaaggagcagctgtgacatcacatggcttctttttccttgcctccccaacatctgaacactaaatctggctgattttgcctcctaaatagctctcctttatttccttccggctgctttcttaattcaagcataattatcttttgcaaggactccatgaaaggccaccagctgatctccaagacttctccaatctgctcaacattggtttccagaatggccgatctgctgggcacaggataaagttctaccaaacccagagggacttcagaatccattttctccttctcctctccagctttatttcttatgctgccccaacacccaacttcccaaacttatgctctaaaaatagcactttcttacacaccccgtgcctttgcacatgcctgacatatccagccccctcttgctaagtgaactcttgttcattctttaaaaccctttccggacattgactcttttatgcagtctttcctggattcattctttactctttgcttttcttcgttgcttctcagtcttgcacacacatttatcatttccatttactttcttgttcatattttctgattcctccatgagaatgtgaggtttttgagaggggattgcatcttatgccatcttgatacagcagtttctagcaggtaatttggcatagagaggatgcttcaggagtattcacagaaaaaaaaaaaaacccaaaactcaaatctaccctgatcttaagcatttattgagcaattattttgcccatagtgctatgaggtacaaatagagttctttagaacctcaggtctgaagcacgacaaaacaacaattgtagcattgattagtgtcagcacaacaaaacaacaattatagcattgattagtgttcttagtagttgacatctattaacatttaatcttgtaaagtaggtcctctcattgttctcattatgcagatgagaaaactaaggtttagagaggctaaataactttcttgaggccacacagatggtaagggatttgaacataggttaatccattgctgttaggatcaagaccagatcccttaccagctctccttcccccaactagcccagcttcatcttcctctctttttaaaatttgttacttgtttatttatcaagagaaactatttctcagcccacatattcatgcttcatggttcaggaacacaagtcagtgacaaactttaacccaaagaaattctttcaattccaaaatcactttgtactctgaaagataccagccttcctcatctcctgaaaatctgttatagaattacaatttctctagaaatctgtgtatgccttatttcttggttcagcaacagcgaacctatagagagctgcaatccatagggatgcaacaaatgcttaaacaatatgaaaccacagatgcctggctggaaggccacacatttgaggttttatcaaagcactgaaaacctagttattgtcttgaaaggtatgtcaacctaaagtaacaagattcagaaaatatcattaagtagggcatttatttgaccccaaaacttgaggatggccacttgggaatacagattcaagttgccctgaatatacactaccagtttcctgtttcttgtctcttgctcactctctgctttctagcctttctagacctgaacatcctgcctcctgccacagagcctttgcacatcctattatctggcctgaaaggctatttcttcccatttttggtctaagtactcatctttcagatcttaaatcatggatctctttcccagaaaaacttttctgaccttcctggccacaatgagcaagtggaacccatcatgggtgtcaggggcaccaatcaatatttgttgaatgaatagaatgaacgaatggtccttgatgatcttctttagagctcaataatatgggcagagaagaaagagtgtaggcggtctaaggtggtcagggaaggcatcctggatttatgtagacagagaggcctagagaaaaaagccaggaaatacagattatatacctgtctcttatagctatcatataacctgacacaatgttggcatttgatgagactttggtgactacttggcatctcgagaatcactgaagagtagccaagagaccatgtggtccattatccacacctgtcttatggaaagggaaactgaggcccagaaaggaaaactacattgttcacatcacttaccaaaatagaggaagaaatgaaataaaatccatgtctcccaagtccaggactggcagatttgtgtcaagtagaagatgtacctaaactcttggtcagagaccagccatcagtgaactaggagacagaggtagtgcagtgcaggtggagataggaggtgagggcactgggtaatttaggaagcatctgagttacctttctgaagtctaaacatttctttccacggctgaacgggcaacacttcatgttttctgggcaatctctgggtttggtacactggtctatttcttccacttcgcattccactttgattttgggacacggctctaagggaggggaagatatattccctcaaggccttaaaggagccagtgctccccctccccgagaccagggcacccctccagagttagagaactttgtttccacttcacctatccccagaaggtagtggccctcagggggctcaggaatttcacaacactgctcacatccccaaccccataacaactcaccatcggatgcctaaaccaacccctaccccctacccgcaccatctatgagattcctgagagaaagacgcattcctctaagactgttctggtcactcagccttgctgtgcttggttgctcccccaggaggtgctgtggctctcgatgattgagattaacatttctggcatcagatagctgggcttttgaattctgtgagacgcttggtgtgccaggcactctctctgagccttgatttcctcatttgcccatagggttgctttgaagactaaccagcaacacagtttgacaagccatcgtcaaactgcctggggcaatgtaacgtaacaatgagtaatatggatgaagcacttactgtgagctgccttttctccttaatcctcattacaaatctatgggtaagtactcttaatattcacattttgtaaacagaagaattggaagcataaggagattatgtgaatttgcccaagatcacacagctactcaggggtggagccaggtttgaacctacaatgtgtggctcctgagtgctcactttcaaccactaattttcagtgcccagtacagttagctgctaattgtgagtcttcacatttcagcattccaagggacttctggagaccattctttaacccaaagaccagggtcctctgtgggtatgggtgtgggggctgcaatgagaacatttggaagttgacacaggtggtgttgtggggagcagcctgtttttcttgtgggagacttccttgggcttactactccttcttagttcatttcatgagctctaggtccaggcacctccaggaagaactctttggaatggcagcaaggagtcacttgccacagatttggatgcctgtattcaccaagggagtctcttaccaagagacttcaaatagctcccctctttcccacctggaattccaggcagaggtggagaaaataatttctcagctgcaaaattattctttgttccttcctccccactgagtttcctttccccattgcaaggacggagttcccaatacttactgccaaggatgccttcagcgtgcccaggttcctggatgtcccccaaaaggatgaatggtaccaggattggcagaagtcctgagagtcccattttaggaagtactggcctggttgatggcaccaaaactaagaactgctcctcagcagctcctacatctgcactttgcctgccccggtgtggcccagcaccttaagagacagccctggagacaagccagccagactccccgatcaggaacaccagatccctgaggccatcagtgggactacctggtacctacactgggggataggtggctcctaatcctcagcaatctgaggctttctggtctaccagggaaagagggcacatgttgtcttgggctttccaggctcccttagcagaaggggaggtttaactccagagtcttccatttcccagggggagtttgcaggttaacagtatgctagctctcttccttctttctaatttcactcttctcctgacatgtctattcttatgttttatttttctcactctgtttcttctcttttctgtgcatctgtatgtcttttactctgtgcctgtctttttctcagggagtctctgtctgtctgagtctctttctccccgcccttcacttccctctctcttctttcgtatgtaaagatcagttacatttatcctttaagtcgtttgattttgcaacagtaaataacttctttcattactttgggacttctccaactctgttctccgtttttccctgttgtcacagctacagcattggattaaaagtcacaccctgaagcattaacgcttgagcatctgtaccaagttttatatccttggtataagcccgaaggaggtgaggagccagttacctgggcatcagttccatctggcaaaggactgtgggtaatggaagcatttctgcagggtggcagcagggtgtgtgtgcagcaaggcatgtcatcagtggtgagtgagaagttcattcctttttatggccgaataatagccaatgcacattgacagcctcctacctctagcatcagtccctaattttctgctgtgggttttctctggcccccagggagcttgtatagcttgcaagtataacagtttgaaagagcgagggatttagtatccctggcatccagtgggcgttgggaatcagtggacaaatagcttagctttcccatcactggagacagattaagaaaatttgtggtctgatatccagaatctacaaggaacttaaacaaatttacaagaaaaaaaacaaacaaccccattgaaaagtgggcaaaggacatgaacagacacttctcaaaagaagacatttatgcggccaacaaacatatgaaaaaaagctcaacaccagtgatcatcagagaaatgcaaatcaaaaccacaatgagataccatctcatgccagtcagaatggtgattattaaaaagtccagaaacaacagatgctggtaaagctgtggagaaacatgaatgcttttacactgttgggaatgtaaattggttcaaccattgtggaagagagtgtgccaattcctgaaagatctagaaccagaaataccatttgacccagcaatcccattactgggtatacactcaaaggaatataaatcattcttttataaagatacatgcatgtgtatgttcactgcagcactatttacaatagcaaaaacatggaatcaaaccaaatatccatcaacgataggctggataaagaaaatgtggtacatatatgccatggaatactatgcagccataaaaagaaatgagatcacgtcctttgcagggacatggatgaagctggaagccgttatcctcagcaaagtaacgcaggaacaaaagtaaataccacatgttctcacttgcaagtgggagatgaacaatgagaacacgtggactgttgagggggcagggggagggaaagcatcaggataaatagctaatgcatgcggggcttaatacccaggtaatgggttgataggtgcagcaaaccaccatggcacaggcttacctatgtaacaaacctgcaggtcctgcacatgtatcccggaacgtaaaataaaataaaatatttttaaaaagaaaatttgtaagcctgttttacatgattctttaaaaggtccccaataggattgagccacagtagtaaccagctcataatagactcttctctcttcccttctcttccctgaattactcatctcactccccatcttgtatgtcctgggaaatctctcaaacaaactacctgcacccatgcccttttcccagggttagtttctagaggatccaaactaaggcactgtccttgggcccttgcctaaaaagggttttacaatcttttgtagaaacagaggaagataacaataacaatattcctggaactctgaactctcaaagttctgattgtcttcactcccttgaatgatgtcaccagaagcctcaatgatcccttactctgcaaagtgtaatgtgccaaaaagatgtcaatcactcagcctcaaggcacaggactacatcaagtactttactggaaaaaattgagagtgacacaggtataaactgggagttctagaagttggagataaaggggacataaagatgaaatcaaaacggatggatattgtgcatcaaaagagccaaagatggaggaagaggaggtagatgcaagcgttctgttctgggaagggctaagatcttggaatgctgagagtgaaactggaagccagtctggagcatccgtcaggtacaggaacagtactcagagcatgagccacattctggcagttcttccagtgcatccttatccaatcagggaaagcctgcagagaacgtaggacagaaacagctgagcatcttgggttcagctcatctttggagcttgaagttatgtttatacatctttgcacagaaagacactaaaaagtagtgggtttgctttggggagctctccatctccttcaaggaaaaacaaataggagtgaatcgctgccaaagagttgtgttgagacattgatggcttagaagggttggttggtcaacgtgtcttaagtttagcgtcctgtgcctcttctgcaattcatctctgagatttcaccacttctacacccttcctccacccctcctaattcccctcatacttgccagcattgattacttctacatcccttctcatcctcagttcctcatactcagaaagtaactttgtcttgccttttgccaggtgcattcttacctcctgatcagagctggttctgtcagcaccaggtctgccaaagatgtagctgtcctggaatggaccagccaacacccagacctcccggcatgggactggagaggatgaaagaccggggcccctaggacttacgtttattcttgcaggtgttcaggcagttggctttggattggaagttgttattgtttccctggcagccaccatagacaaacatggagcaagtattatctttcttgtcataccaccaatgaagaaaataagccaggcaggggccagtttcttttggcatttcgcatacatctgcagagagactccagagttgaaaactcagtgtgcccactccagaaataaacagttgttattattctccctggcaactgctatagaagaaactggagtaggctccttttctcttatcacatggcaggagcacagctccactgacatattgcacacatttgcaaggagaccccagagtgggcatctgcatccctggagatagggttgttgcaggtgtaattagctaaaatgaggtcagaccaaaatagggtgggcccctataccaatatgactggtgtccttatacaaacaggttaatttggacagaggcacacacactgtgagaacaccatatgaatgtgaaggcagagatcggggtgatgtgtctacaagccaaagaacaccaaagattgccagcaaagcaccagaagccaggggagagcaatggaacatgcttcttccccataaccctgacaaggaaccaaccatgctgacaccttgatctcggacttctagcctgaggaactgtgagacaatacatttctgttgtttaagactcccagtcagtggtgctttgttatagcaactctaccaaacaaatgcaggtcccaactaaataatgcttacacagttccatttgggtaaatctccactgctaaacaattagatcctgttgatttttacctcctaatagctcacctctctgccagtctctttaatataagcctcagtgtctcatgcctggactgttgaggtgacctcagattgatccccctgcctccattcctggcccctccaatcaatccttcatgcttcccaccagagagaaggatctgatggatctgagagccaggcttatcatgtcattgcacagagaagacctaccttcactctatgacaatgtcctcccatgacccacaaggcccttcattgtctggctcctactgtgacgctggcctcctctcctgccgcagaacccctttgagccacatgctccagcagtactcaacacaccgtgctacctctatacctccatccctttgcactgctcacagtgacactcttcttacttcaaaacctttctcagacatcaactgctgtgatgtcactcttgaccccattctacattcctcactgccacaccttgcttcagagtcttgtgcattcatttttcatttgtttatatcttcagtctcatccctgaggctgtgagtttctagtgagcagggagtgagtttctagtgtatctgctttcatcttggcatcccaattcctaacaggtagcctggcacagtacagaaccttatggaacgttgaggataaacgaaatgtatcctgatctgaactgaataaattattcattgagcacctattatgtgctcaatgcttcaaggaacagagaaaaggcatgatctctgctatttaggagcccttagccaagaattacaaataagcgaataggtatcaggtggctactgtgtgccaggcataactctaatcacatcatgcagatcaattggatcctcaaaataatcttttacactgatccttttattatctgaggaaactgactcacagtgagggaaagttgttaatttatccaagacaaaaaggctcgtaaaaactggaggtaagagttgaactcaggatggctgaattcagaatccttacctgctggcatatgagtgacttagccccctaacctgcccactctacttctctgtcaagtcctgttcactttgcctcctatgtcctactctttctttcaagcaggtcctactcttcttcatcccctcagctacctctagttccggccaccatttctatcatcttgaagtcctttaagatactctgttcctcctattttaaactcgatagatgtagtatgaacctggtcatatgatgccccgcctcggtggattgccatagcccttgggatccaggcaagactctttaatctggcccaccatacctgaattgtttgatctctgcccacccagaatctgttttccttgtaccatgctcgtgctcactctgcgttctggactcccaaggccccaccactgagcctttgtgcatgctactgcctgtgcctggaaaacccctccacccactttttgcctaaaacattacccatctttctcaactcaaccccagattttctttctcaaagaaggcaatcccaacccccctgaccacactgagaccaaatcctattgtgggtctcagaggcactcaatcagtatttgttgaatgaataaaaacagaatctttgatagtctttttgcatcccagggtgatgggcatgaaactaagatgcagcagaaaggagaaaccctctgttctggagcagtcaggagaggcgttttggtgcaaagttggatttgtgtaggcagagaggtggtcactccatagcaaaaaagttgggaaatataaattgcttaatttatcacttgcagcatatgttagggcaacgatggccacctgggagctcaaaaaattataagagtgacaggtatccaaatagccaaaagaatctgattcaatgccactgattcaccaatgatttgttctgggaaactgagtctcagacattacctgataggataaggtcattcctaatggcacacaccatatttggcacagtaatgaatctaaatcgcaggtctcccaagtccagcagttttgccagagaccagccctcagcgatcagggcacaaagccagtccaggaaggcagaaggtgaggacagggggaggaggggttggttattctgcagctctgaatattaccttgtttgagatctaaacatttttttccgcagctgaagacacaacacttcttgttgtcctggcattgtctgtcctttgtacacacatccctttcttggaattcacattcttctctgattttgggacatctccctagggaaagagcggttttacacccgtgtgccttagagagcatagtgtctccccactttgccagacacaaggcaattctagagagtcagggaagtttgctttcagtttgcttgcccccaggagttcttttcctcagggcagcctcactcatttccctactgcctacacccccaccactccccagtgacctctcctccctctattcccaccccccagctccatcccatctaaggcagaatttctcaaccactggtgatatttgggctggataattctttgtttggggggctgaactggggattgtaggatgtttagcagcatcccaggcctcttcccatcagaatccagtagcacccctgattgtaacaactgaaaatgtctccaggcactgcaaaggtcccctggaaggcaaaatcacaccattgtgggccactgatgtaagccaatgcggtctttttggccttgttgaggaatccatgtttggaagttcctctaggtggtagtattatacagcaattagtatcacttaccccggagccagtttagattttgaattctgacttggtctgaattctgaccctctctgaaccttggtttcatcatctgtaaaatcattttgcccttacggattttgtgagaaaacaatgagacaaagtatataaagccctaatcaaagtaactgatgcacagtcatattatctaacatttgctaagtatttaccataagccgagcactcttctaagcattttaaatgtatgatctcatttaatctttataattgctctatgaaggaagttctattaatatccccattttacacatgcggaaactgagacccatgaaatttaagtaacttgcccaagattacagggctaccaagatttgaacccactaagtctgattccagatccctctgttgttttagaaatcccttttcagaaatccttacttcctgagtgttcagcaaatgataccaatgatcattgttacattatagtcatggaattaatattccacaactaatgtgtcttaagtttaaagagacttctggatgctgtcctttatctcaaagttagggaacccctagggatacagggacactttatgggactacatttgaaagaaccaagagtggatagagatgatgcctcaaggaaggggcctgttttgcttgtggggtaaggagaaggtcccttggtttcccggattcctgtagcgactcccctgaaagctagatcctgtgactctcctccacctgcttgataaagaccctccacttcaaaggagctgaaagtggggattgcctaagttggggttactgcattcccagaaggaatcttacacaggagggatcttacaaatatctctctcctctcccaacccgggacctgggctaagatggtggaaagcaacccacatctgaagagttcttccctgttccttcctcccagcaaactcccctctctctagggtaagggctgaggccaatacttactgggaaataaccaatcagtcagaccaggtccctggacattcgctaagaggacgaatagcaccaggaggctcaaaagtccagaagatcccatgttgaagagaggccagcctttctggtggttcccgaatttggaatgctcagctgctgcaccttggatataagaactggagacaagccagccaccccctttcttgctgggaacactaagttcccaaggtcacaaatgggactaactggcacccacagctcacagcttgggaggaagggtctcttattgaatggatcttgatccttacacccctaggctgcactgggctgggggctctagtcaaccacagggagtgggcaaagcgtgtctcccactttccaggctaccttcagagtgaatgccaccatcttgggtcttcatcttgataacttggagagtggtggaatgtcctcattcttcattcattttccatcgtacgtgcacacttactagcacactccttctgcttgtctctgacaatgtgtctctgtcggtctcttggtatctcattgtttatctgtgcctctctgtgcctaagtctactgtttctctttccccatggtctctgtgttcctttctccctctcccacagtttcctcccatccttctgtcttttattgtatctttggttcactcatattcgttgactaaggccaaagaatacagatttgccacagagcagggtgtaggggaggaatcaggctgatagcagagtcttcagagaatgtttctcaaagttttgttgctctgagagcaagagaggatatcagagcttagagggagcctttatcatcactgccagctccttgatgtctgaggaactatgaagtgaagggacttgcctgggagactgcagtggaataaagttcagtaacacagcagactttggggattctaactgggctgctagaggagctgtgggaaagaggtgctggggaacttggacagctttcctttcctacagccatggaatctacactggccactcagccagtcctgggaagaagagagacactctttacagagtaaatgttatcccgagggctcccgttttcttctctaactaggagttacccttttgggccaagtttgttctccaaattttcctacatgacagacagaggccagacaaagacagccttattatcagagagtgactatatggtcacaaaatttaggatcacagacagccgccgtaagaatcccatgccaccaacttgacaatctcacttgaagagactaccgaatcaaatttttcttttcttttttcttcttttcttttcttctcttttcctttcctttcctttcctttcctcttctcttctcttctcctttcctttcctttcctttcctttcttttcttttcttttcttttttttctttaaaaacattcttgctctgtcatccaggctggagtgcagtggcacaatctcggctcactgcaatctccaccttcccggttcaagcaattcgtgcctcgacctcccaagtagctgggattacaggcatgcaccaccatgcacagctaatttttgtatatttagtagagatgacgtatcgcccttggccaggctggtctccacctcctggcctcaagcaatttgcccacctaagcctcccaaagtgttgggattacaggcatgagccaccgtgcctggctagaatttctaatgaatgagtaagacgtcgtaagcagtgctgtttcactcatttcatttcccatattctcacaaactcagcccaggagagagtgaaaactggaatatctaagtggaagggctctgagggaccatcaagccctatttctcaatttatagatgggaatcataaggcccagagaagtgaggatgctgactaaatgtcacccagcaagtgagtgtcagaaataagattaagagggagctgagcacacaagttcttgccagaggacaccagggcatgttttgatgttggtgtggatataatattttcttgtagagttgaaggtagagaggaagggtgagtctaaaggaatgaagtaatgtctttagtggagacagaggctgaacacccacaaagtgaaagtcagtaaatttctttttttttttttgaaacggagtctcactctgtcacccaggctggagtgcagtggcgcaaacttggctcaccaaagtcagtaaatttctaaatggtacccagggtccccaattaaggctgcattttttcgtaaattttattgaaaataaattaactatctttctggttgcttcattccattctgtcttgcctaattttcaggcccatccaagcatctcactttccaagcaggtgaaataaaatttatgtctttgggacttgggataaatcatggttttggccccttctctccaataatttcttggagaaggctgggtaaggacccacctggggttttgcctctcctttcttcatcctttctcattgagggcatggtgccctacctctgcctccaggccaattctctcccaggaacaatcctgtgcttagaacaggggactccaacgagaaccaacaagatcagcctctacctggcacctcctgctttttcattagcccaagatctgtcacatggactgattctctgtcactggcttcctatgttgttccctctgcctctaactctattactaagttacatgtttgctcccccaagtaagctctgaactccattaaacaggtctgtgtctagaacgcagtgcttaaaacatgaataggccccaaataaacactcagtacatcttgctggaagagcaaggtaggtgggggggattggtaggtgtgtgaataggtaggtagctatgtggatggatgggtggctggtagagtgtgataagtgggaagatggttgagcagggagagggattagtgaggaaagcatggatgtttgggtacatgaatgcatggattatggatgggtggatgattgggtgaataagtggattggattgaatataaagatggatagggtagtgatgggatatgtgggcctattgatggaggctgtttgaatgaaaggtggaagagtgcattggtagggggatggagggagttaggtatagaaatgatgaatatgtattttgatgggtatgaaagagtgtgtgcatgtgtgtgtgtgcagagaaagggggaagagagaggtcaataataggaagatgaattaaaggctagatgggcaagtgggtctgtagaagaaagatgagtaagaaaagtaagtggatagacatatggagtaggcaaatagctaagttgaaaagtgtgtcagtggaaggaaaggagggataggtgagtggggattgggtatttgcatatgtgttgagtgaatggataggtgagtaaagggattgaatagttagtaaataggtgggtggaaacatgaatgtacaaatgaaagcattaaccaaagttaaagatataaaagaattatatagagaacaatttatgctactctaaagtaatacatgtgaaaatataggaaaaatggatcaattttaccaaaatacaaaagaccaaaatttgcagaagaggaggtagaaaacctgcagactataagatgaaatatttaaaaattactaaaatataccactagaaagaacctgatctagatgcttttggagctgaattttggtagccttcaaaaaatgctgaattgctatattatgtaaaatatttcagagcatagaaaaagtagctaggtttcccaattagttcccatactcattttttgaaagtaatatgacccaaatagaaaaaacaaatttaaaaagacctatttttcttttgactatagatgtgaaaattcaaactatactattagctaaaaagaaccaataatatattgatacagcagtctgcaattaagtttattaagaatgcaaggatggctcaagaaaatttagtaatttattatgccaacaaattagaagagaaaaatcattatgtgactgtatgcttaaaaggtatttgataaaattcagtagtcattttcagtagtagctataaatggataggaaataggcttaaaaaggaaataactggccaggcacagtggctcccacctgtgatcccagcactttcggaggctgaggtgggtggatcacctgaggtcaggagtttgtgaccagcttggccaacatggtaaa[141 bp omitted]caataagagcaaaactccgtctcacaaaaaaaaaaaaaaagaaagaaagaaagaaaaggaaaaagaaaataatttaagtgcaataaaacttatgtattccaaattcaacaacaaatatctttttatagtgcaggagccattgactttaaaataaggaactagacaaggatggatgccattgcctttattttcattattattttggaggttctacacaatacaagaagacaagaaaataaagtcatgaagttgaaaaaaagccaaatatatcatcactttcagatgatgggattatatataaaatcaaagtaacatcattcaatattgtgatacttaagataatttggcaagttggatacaagacaaaactgacagctctttatcatgctactcataattaatgattttgatgataatattttctacttactattcaacgtctggggtccatacatttcagtccacaatgtgagcagcacttttccaccaatgggcactcctcatcctgcaggcacttgggtttatcaatcttggtacatagcaagggcttgcgtgggcagaaaccttttttgactttatggggtaaaagaaaacacttgaccttgaaatacttggtcataatttgagacaaatttgaggaatcttgggaatctcaaacaaggttttattctgattaagcttcttacctttccccctacagtaacaatagactggaggaggcagagtatcaactttctacgactaataacttgaggagcatcaagaaaagtcttaccatctctgacttgtaccatctgataggattcctgtctgctcctacagaattaatggatctgggttatataaccccagagtaccacaggtggcaggagtattagcacacagaaccttcttgttttacaaattgtaggcattgaggcgtatttagagggaaatgagttgcccaatgccacatagaaagccagtagaaaagttgaagtaggttgaaaagccttggactcctgccaccacactatactgaaccttagaaccttaaagccacacctggacaatccctgggactacatggggaagtaaacacctgccttagaggaggcaggaaagttggcttctatccaacatcatttgctactaatgttttccccagcccatcttacaggatatgaatatgatgtgcatgctttgaagttctgtgcagacatgagggcttattaggaatacacctcatggttatgaattttttatgaatcggtgaatattgtcaccttgcaagtcattgaggaatgagtctcagaaaaaataagttttcttggggaagaatagagagcaatgctatgaattactggctttgaagaacagcacaatagtcttcagaggtcaagaggtcaatataacttgttgggcattaaaaggggttcccaaagatcctcaaagatgagcccaaggagcatctgaggttcaagacaccccccactccatggagacagcatgacatccttggcacatgcccaatagatttgggaggtatatccccaatccttacctgtccaggccctggcacaaacaaagccacacctggattcacaacatttgtctgtctggggacaatcgatgtcactgtgacatgaaggtggacactccttacgttcagtgaaagggaagagtgggcattgtccatccttaactaaaataagagcagatgtgagcttcttaaaaccccacccccatcccaccacccttcaaagagcctttccttctcttcaaagctagtatccctttctgcaacttggttcaccctaccctatccatctccagtaggctgtggaagaatgaaatgtctcatcatatcatgggatatggtagagagcatgctgggcttggtgccttaagccccatggtaaagtcccagtcctgctacttggtgagtttccttctctgtaaaatgaggataattatgtgaaatctacacaaatcagtgtaagccattttagggtatttggttttacttagaatgaaatggggatccatcacactgttctcagtagagaagtgatatggcctgactcatgttttgaaagggtcattgtgactattgtgtttataatagattgtaaggaggatagaagcagggagaccttttaagaggctgttggggtaatccaagtaagaagatggctcttcagatcagggtggcagctgcggaggtggtaaggttttaccagatttaggatctactttcaaggtagaactaaaattatttcctaactaacttaatggatgttaattgataaagagaggcatcaactgtgattgtgaagtttttcaaccaagatgagaagcatggatagaaccggtttgcgttaggggagtgatggtaagaggtactggtttatgtttatgttgagcttatttttctgtttttgagacagggtttcccactgtcactcaacgaagcctcaatttccccagctcaagtgatctttgaggaggtgggaatacctcctcaagtgatcttcccagcctcctgagtagctgggaccataggcacgtgacaccatgcctgttttttttgttgttgtgtttttgtttttgtttttggttttgttgttgttgtttgtagaaattgggtctcactatgctgcctaggctggtctcaaactcctgggctcaagtgatcctcttgcctcagcctcccaaagcgctaggattataggtgtgagctactgtgcctggcccgaggttctgtttaagcaagttcaacatgagatgtttgtgaggtccaggtggagatgtagagcagatagtggattttaggagtcagattagggctggagacacaactttgtgggtcattaggacataggtggtatttaaatcaattctttggggttttgtatgctcttgtactcatctgactgcaaattctacaagggcttccccaggtcaggctcaggctatgatgtgttgaactctcagaggtattatcaggttgcctctgagtcttaacctaaatttcccacaaaccagcccaagcccatttccctggcctcctcttccttgtcttcctgggagaggagacaaggctcttgtccacagcaccatgattccttagagcttcccatgaagggaagcttgtggtcctagtttcaagtcaggtcccagggttgccttggccgttcaggcccatgggtccatggaattaaaattccacctctactcctgaccaactgtgggtcctcaggcaactaacttcacctctctgactgtgttctcccatctgtaaagtggtagtgatggtacatttttcagcttgcctcacagaatctgaggtcgaaattgcaacgctgcctcataaatcacacagttgtgaagatcactggtcaccatctcaattgttaccgtttagtgagcccacaccacgggaccaccactctatcaagtctttgtgttttaaatcacatataatcctgccaacaactcaacgagctgtttgctgtgactccagaattacagaagagggaactgaaattcaaagaaatgaagaaagcagcaagtgggaaaagtcagatttaaattcaggtcatttgactcctaagtttggtaggacactgtttcccaacattgctggtgatgatcattatactaaggaatgaatccacagccttcaccttcaccccaccctactctccacctccagtgtggacacttactccatgggattccagagctggcctgtctacacttcattcttaagcaaatcctcagtatgatgctcaacaggttactatgatgaggaaacaccttcttccaagggggcacacctggctttcgggtcacattggccaagatctattaacattttctatacactatctcattttttggcagagccactccattaggtaaatactattattaacctcattctatagacaaggaaactgaagcttataaaggcaggcaactggcccaagacctcccagccagtgaatgacagagctaagtcttgaaccaaggaactttaacctcaaatcctgagcctataacctcattggtatactatttctagttaaactagaccctcagatttccaggatagaggtctcaccaattaacatgcaggccgttctgcaggcatcctcatttaagaagttgttggcattcccttcgcagcccctgtatttgaagggtgtgcagcggtaatttttaaagtcaaaatgccagcgctgtgcctcatgattacagtttccatgcctcacaggtagcatgcagggttctgaggtcaggaagcaaggaaagaaggatatgaagagtagagataaaagaacagggtcagttccctagcatttctcataactcctggtgttatcacccaagtcataaaaggagccatggcaggggaaaaaaaaaggcataggttctggtcccagttctactactaatagtctatgttgtatggcacctctgagcatcactccttccttgcaaagaatattacaaggtgcatataagaatcttgtactttggagctgatctttcttctccactgtcctgagctttggtagggcaagacttgttcagcaactattaggttgatgcaaaagtaattatggtttttgcattgttaaaatttgccatttgatattagaatacattcttaaataaatgtggttatatcatatatcattttaatgcacatttcttgcttcctgtacttttgctaatgacttattatttgctgtttaatttatatttattttagactatataaattatgtcagacaaaaagcaaattcgagtgattttctcatttgagttgaaaatgggtcgtaaagcagcagagacaacttgcaacatcaacaacacatttagcccgggaactgctaagaaatatacagtgcagtggtggttcaagaagttttgcaaaggagacgagggctttgaagatgaggagcattgtggctggtcattggaagttgacaatgaccaactgagagcagtcatcaaagttgatcctcttataactacataagaagttgccgaagagctcaacgtcaaccattctatggtcatccagcatttgaagcaaattggaaaggtgaaaaagctcgataggtgggtgcctcatgaactgagcaaaattaaaaaaatatatattgttttgaagggtcatctcttattctgtgcaacaacaacaaactatttctcaatcatattgtgacgtgcaatgaaaagtggattttacacgacaaccaatgatgaccagcttagtggctggaccaagaagaagctcaaaaacacttcccaaagccaaacttgcaccaaaaaaggtcatggtcactgtttggtggtctgccgctggtctgatccactataactttctgaatcctggcaaaaccattacatctgagaagtatgcttagcaaatcgatgagatgcactgaaaactgcagtgcctgcagccagcattcgtcaacagaaagggccaattgatcaacagaaagggccaattcttctctgccacaacgcccaaccacacgtcacacaaccaacacaaaagtggaatgaattaggctacaaagttttgcttcatccaccatgttcacctgacctcttgccaaccgactaccacttcttcaagcatctaaacaactttttgcagggaaaacacatccacaaacaacaggatgcagaaaatgctttccaagagttcatcaaatcctgaagcatggatttgtatgctacagcaataaacgaacttatttctctttggcaaaaatatgttgattgtaatggttcctattttgattaataaagatgtgttttgctttattttcttttgtttttttttgttttttgagaaggagtctcgctgtgtcacccaggccgcagtgcaatggtgcgatctcagctcattgcaacctctgcctcccgagttcaagcaattctcctgcctcagcctcctgagtagccgggattacaggcacccgccaacatgcccagctaatttttgtatttttagtagagacaaggtttcactgtgttggtcaggctggtgtcgaactcctgacatcaggtgatccacccgccttggcctcccaaagtgctgggattacaggtgtgagccaccgtgcccagccaataaagatgtgtttaagcctagttataatgatttaaaattcacggtccaaaaccgcaattacttttgcatccaaagtgcctaacaaagtgcctagtacctagaaggaatgaaataccaaggaagaaacagcccctgatgtctgaaaagtgatctgacactcccagctaagccacatggattctctgttggacatttaaaaaatctcctagaacatctgtatcaaccaacgtcactctgagatcatgatgaagtgagacaaaaacaagatcacagtgaaacctgcaaaataccaaacacccgcccccctctaagctaacgtgagtgacttatgcttctctaccaatcaatcacagctttatccttagtctattctgtattctgtattgttaagattccctgggatagccagtcatagaattgcccccgctttctgacagcacccaatctagagaaaactctcacttctttagaccctcccccgaattacccaatcaaagcccaaatcctataatagattctttctaccagcttcttactgaaatgcctcatacttgtctagggtgaatcttttccctcacttcaataagtaataaacccaatttgttcaactataggtgtattctggtggtctttgttcaaagggcattaacaacagatatttgttgaatgaataaatgtatgagtgagtgaataaatgaatctttttaaaaaacacacagttccccgcacatattagatagatgcccaatacattgagtcaccagaaaacctccttgaagatcaaagagtctgaaaaacaatgccagcatttaagctgactgaggttttattttgtcacagtgccataacagtctcttgaacagagtgcgcatgcaacaagtattagttatttgtgaataattgaatgttggacccaagaagaccagcatcaatattatggtgattgatggtcaccatgcctagacttatgacttgtacttgagggttaggcattgaataacagaatgagaagagcacaggccctgggtccttgtcctgccatccaagggaatccctcagccagttttggacagagcaagaagtggggaacctctgtcctcagcctggacatcgctaccttgaaagggatccatgcacttcttctgacaggcaaaaaagcagcacttctggtattccttgcagtcaaaatctgtgttacatgagtccggaagttcagtggtacaggtgagcctctctttgggacataaccctggtttgtctgcaagaaagaaatgtccaaactcacattctttcggaatttcagctctttttctcctatggcaaaggtgtgtagtgaaattctctcagccctatcctctaccttcgattcttagttcttgctctgcttatattcaggggctagttctgtttctcagcactcagattcattcaaatggatctgaatcaggaatttgtgtccaagaagaactgaaggagaagcatgttggataccagggaaaggggttagaaagggaccaaggccctttccctaaattcaaaagattttctctcttcttgaaacctaatattttaatgcttaattcctttgtctccagttgataaaagaaattagtaaagactggtgggaacatcatggaagtagaggtcaggagggctgatttgacccttgactcctggtaaactcaagaccaatctgaactcattgtatgatttttaatttacctctaaggagtaagaaacagtggagtggaagaagcattgtagtcaggcagacctggctcgggagcctggctccaacactaaccaactaaataatcttgggaaagtatttcccttcatctgagttatattttccatctttaaaatgagaatgacaattcctgccttacaggctgattataagagttaaatggggtgatgtctataatgcctggggtaagaccttggcagatgtggcgttgctttctaccttttatttttatttttatttttttactaaaaactagaagaggcaaggggaaaaaaactacagcacccagtgtttccagtcagtctcccatccaagtactaaccaggtctgatcctgcttaccttttgagatcagacaagatcaggaattttcagggtggtatggccatgcttccttcctttttaaggctagacatggcttcctgatttcagtgcttgtggtaggtagaatctaaagttgcaccctcaagattcccatcttctgattattgaatcaaacactaagctaggcaatgctgtgaagggattttgcagaaaaattaaagacccaagttagttgactttaagattagagattatctctaattttaaggtctaatctctggcccagacctagtcaattaggtccttgaaaagcagagttttcttctggttggtagagaagaattgattagagagattcaaatgatgagaaggatccaacttgctattcgtagctttgaagatggttgaggccaagtgccaaggaataagggtggcatctagaagtgacagccagtaaaggagcctcagtcctacaactccaaggaaatgactctactacaaccagggagcttgggagaggacagtgcatcccaaatgagaactacagccctggctgacatttcaatcttggcctggtaagacccggagcaaagaacccagatgcacaatgccagacttctgacccacagataatttgttacgtagcaaaggatagctcatacagcgcttaatgtgtctccatgattctaaactgagcatccctccagtggaatctggccagagaggcatgatcctttcagatactactgagtcttggaactgtagaactttggaatggaaagaactctatttatcattggtaccaaacttctgatttcatagatcaaaagtaatgaggtcagataggataatacaatgcattaggggcaagtctgggacttacaatccaggactcacttcaggagccccacgtcttccctgaggactggccactgagactttgagtactttccaacaatacttcttgtcattaatgaccccctccaggaatggactgaagctaagaagagtatgtggttcctaatttggagtgtacatcaaaatcatctatgcatctttcagaaaatatagactctaggctgaatcagaatctctagaaagtgcatccttgggactccactttttaaaaagaaccccaggtggtcctaaagcaggcagtgggctccaggagataggctgttacttgggaaccattgttctaggtttaggcagagacagagttcggcaaatcaaactgggtttgagttgttgtagctcctttccccattgtcagcttgaactctcacttattaataaaaaccctcctccgtttcttgttggctcttcttaaccacttacttgtgtgtataagcatacctcatgggtttctctgcatctactggggatgcttctcagagatctggtctcagctgtcttctgacattacttgacacatacttcctgggtaatcccactcgttcccacgatcccaactatgattcccatctcttcctccagactcatcctctattccaaactaaagacttttatttcgacctgcctgggaaaaacaccatctgggcatctcagaagcacctctgttccaacatatttaaaacagaactattatcttcttatgcccaagcactaccttactttctattccgcatcttgacatttggcatcaacaggtccagtttgttattagaatccagagattcactccttcctctccgccaccccagtatcccatcactcatggacttgggtcaattctgtctcctaaacctctctccaaaccctgtctcctgcctctctttactaccactccctcagatcagcacctgatctcaccccttgtctcttctcaactactgcagcagcctcctcactggtcctctcccctcaggctcatgcctagtgacttattaattaaaaaacaattaaacttgcgtgtgtgtgtgtgtgtgtgtgtgtgtgtgtgtgtgtacagtgggaatgaatgtaatcacccaagaattatgtgttgagtgatatcataagacagatgagaccagatctctggggatcatccctagtagatgcaaactatatatatagtctccttacatatataaaaatatggaaaagttagggaaataatttggggggagcaagtaaggaaagtatgtggagggccagggtcgtgagcaggggtagctttctgtggccccaaatccacagtagagggggcctcatctgacactggcactggcctcatgtctaaccctcatccccaataatgctttctaaggaagaatggctgcagcttttttgaactcacgtttgatcttcttggtcagcattgcagaagtccactccaaagcaagggagagaagcagcaggaaagctacattcctccaggagaaggtggggctatggagaggaaagtgcctgtatggatgagaagagaggtgggagttaagcacaatccagagagagacacaaagtgtgtgcaggggaaccttagagatgatccaccaggtccctttagttcacaggtaagaagactgacaccagcatggggaaggagtctgtctgaggtcagatggtgagttaaggtgtgtctaagacattccgtttcaggaccctgaccaatccccataccctgccatggtgctgtaccttgtgccacacagacacttgcctattgtcttgttcctgggtaaaaggccacacttgaatgatcacaaggatttatttggaacagttgcagagctggtttgcccacagtcactccaggggcaaccccagacactagtgagcatcttttctttgctccactgatgacagaaatggatggtatgagatttcccagagggcctgggcacactctactggatcttggtgcaccagaagcaagaacaatctcagatgaccttgggttaacagagaaattccttttattccttctgtgactatccaagcctaggatcttatgatactcccagacaaccagatgaacagatgagcttcccccgcctactcaagcccccatttcccatatgtgtcttcatgatccttatgtattttttattttaaggtgtgaaaaactaataatcctttactgtattaactcttagagtgcatgcatttcaaaaatgcaagaggtgggtagagggagaaagaggaagcaagagacagagaaaacatctttatgccaaaatatacatctgtattggtggaacttccgatactgagaaagctatgaaggtatcttggaatagagtatcttccagagttcctgaagccataccatgtggctgcctaaaagtaaagacttgtgacaatttatctccccaaccttttttgttgggggagttctaatcatgtatcctcttcaaattttacaatagtgcctatactctctggtcatggaaattatgaccccaaacatagtgatcttgattttgggcctcgctcaatcccttataacagcatatcttggatcctcaatttcctcatctggaaaatgggaataatacaattaacctggaagctttgttgtcattgtgaggattaagatgagatagcatgaagatttaatgaagtggtacggagtggtaggaaacgtagcattcagagttagacctgagttcacatcctgaatccaccacttatcggctgtgtggcctgggttcagtcacttcacttcactgagcctcaatttgtcataaaggaaacaataataacacctacctcacagacatgagaattacttgaactatttttgtaaagcatgacaagtggcttgtaaatcagtgtttattgtattttagccagttaacaaataatgaatggcaatagtgaatgccaacaaatgttcctattaccattttagcttttgagttccctagttagagactgtgtaaatcattcctttagttcccctaaaagattagccaaaaggccctctggtgctttaaatttttattatcaagtcactctatgggtttgaaattttaccctctaacctgaaaacatctattaacccagtcttgagaatcagttaatcagattagcctgcagtcagttagaagaaagcagatctcgtgggatggaggcaggggagaaacacagattaatagaattgccaaacataatagaggatgtccatttataattttagcataagtatatcccatgcaatataaggaacatagttctactaaaaaagtatttgatgtttatctgacattcaaatttaattggtcatcctctatttttattttctaaatctggcaactttgacacagaatgaatccattttggttggactggggtttgtttgggcaagagactacaaaacacaggtcttataggtaacaaatgagcataattgcaagagttgctcagtgggggctctgaagaactaggacagacctggaatactaggacagacctggaatactaggacagacctggaatacacggacacaaatgtgctatataaataacacactaggttctgggcacggtggctcatgtttgtaatctcagcactttgagaggccaagacaggaggatcacttgagcccaggagttcaagacccacctgggcatgggctgggtgcggtggctcacgcctgtaatcccagcactttgggaggcccaggtgggcggattatgaggtcaggagattgagaccatcctggctaacacggtgaaatcccgtctatactaaacaaaatacaaaaaattaaccgggcgtggtggcgggtgcctgtagtcccagctattcgggaggctgaggcaggacaatggcgtgaacccgggaggcagagctttcagtgagccgagatcgccgccactgcactccagcctgggcaatagagagagactctgtctcaaaaaaaaaaaaaaaaacttagcccagcatggcagcgcacacctgtggttctagctacttaggaggctgagctgggagaatcacttgagcccaggaagtcagtgtttcaatgagccatgatcatgcccctgcacttcagcctgggtgacagagtgagaccctgtggaggaagggaaaggaaaggaaaggagagaagaggagaggagaggagaagagaataggggagagggagaaaaaagaagaaagagagagtgaaagaaaggaaagaaagaaagaaggaaggaaggaaggaaagaaagacaaagaaggaaggaaaaggaaaggaaaggaagaaagaaagagaaagaaaggaaggaaggaagaagaaaggaaggaaggaagaagagagagggagggaaaggaagaaagagaaagagggagggaaagaaggaaagaaggaaggagagaaggaaggaaggaagggaaaaagggagggagggaaggaaggaaggacacacaccaggaatgaagagattttgattgaaatccacgcttcaccatcaaatcactgtgtcaacttgggctagttttacctccgtctacccatttgaaattttacctccgtctacccttttgaaaaatgagtggatttgactagattaggcttgttcaggctggggtacccatatccctcaggatacaggtagattttccaggaggtacacaggtacagagggatctgaggacattactgattattaaactacatatttactttttcctgaagttgatttacttgacaatgagccaccctgaagttctccttttcttcttctctttgattaagtccttcctctttaaatttttttttaaaaaaagcatacttcttacatatctctcacatgtcttcaaagtgtaaaaacttctgaattccaaacaaaggaacaattcaagaatgcattttcctgaggatgctttccatggaagcaaaggaaagaaagtgtgagtaagaaataccaaggggtcagcaccggtttcattcaggtggcaaactcacactaagccactgtgccttttgctgtctaccctagaaataggattcaggagtgtgatagttgccacggggatgtagattaagacattgatttgaattgaaaaatgaagacattcttttgtgggagaaatgagtttgactgatttggctgatggaggactgactttgccaattagttaaatctgtgccatcaagttttttaaaaaatatatttaaagtatgcagtaagataaaagcattttatgaaagtaatcacaaaattttaaaaaaatatattttttataaaatgctttcaaactttcctatattttgaaaccatagtattcaaactttccagcacttacagagcatttcagattagataaggtcactaaatgaaagaataacatgtataactaatcacattattaatcgtttggtagatgctggtaaagcctttttagttaactttctggaaattaagaaaatcacttgtgatttgtgattagtattctaccagctaaaaaaacaaatccttttgcaagataccaggtgtccaattctatgactttataaaaattgaaggagtgtttaatcaagctattgattaataattaaattagatcattaaaataatttttaaatgcttaatattattttaatataatctcttgagatcaataacatattgctagccaggtgcagtggctcatgcctgtaatcccagcattttggaaggctgagtcaggtggatcacttgaggtcaggagttcaagaccagcttacccaacatggttaaaccctgtctctactaaaaaatacaaaaattagtcgggcatggtggtgcatgactgtaatcccagctactcgggaggctgaggcaggagaattgcttgaacttgggaggctgaggttgcagtgagccaggattgcaccactgcactccagcctgggcaacagagcgagactctgtctcaaaaacaaaaaacaaaaaataataaaataaaataaataacattgcaaaatgttctgcagtagaagtgcattcctaaataagtaaacccaaggcaatagttgacaaaaaggcaaataaataagtaactttagtttaaaatacagtcaccctttggtatctttgggggattggttccaggaactctcatggataccaaaatccttagatgctcatgtcgcttttataaaatggcatagtatttgcatataacctacattcattcttccaaatactttaaagtcacctctagattggtaggtatttaatacttaccattataaatgctatgcaagtagttgttatactgtattggtttttatttgtattatttttattgttgtgttattttttattgtttttttctaaatcttttctatctacagttgattggacctgcagatgcagaacgtgtggatatggagggccaactgtaaatgccaaaaaaaaatcaactttacaaaatagcgttatcaatgttaactattttcaaatacaagtagggactgaacatatatgcatggaatcatgttctcattcactgacataagtgtaagtgtgcctccaaacaagttactatgagggtaaatacataaatatattcaaaatacacacactcaaataataagccacagatcacccaccattttccaagaccaaaattttcacataaatataagggcaaatacagccaaataccagtgtaaattaacacgcttacatacacagatatgtgaaaattccagaattcaaagtgacatgcagacatgtaacacaggtgtttatgcataaacacacagctcggtcagaaacggcccatacagaaacagtggtctactgaaacacagaatactgctgtgaccttctcactagcgatgaaaactcaacagttcacgataaaactgacttttaaaatgctcatgctttaaataatagagacaaaggaaccagacttctaaagccactctccaccgccactgaatttcttataagttgataatgtgaaggcaatttcaaaaacgtaaaagcacagggaggttggtgactcccatctggaataaagatttgttaaatgaaatcactgaaattgaacagagaaacattctgtaaagttagctaaatcatttttaccttttttcttgttagagacagaacctcactctgtcactcaggctgcagtgcagccgggccatcctagctcactgcagcctcaaacttctggactcaagccatcctcctgcttcagcctcctgagtagctgggattacaggcatgcaccaccatgcatggctcaaattctttttactgtgaaggccctgctagagacttgctactgctctagttcacatcttgtagaggcaaaactaaaaaagctgttgctgtgcgcaggtgctgtgggagaacccaagaaaaatggtctgaactgaaaatctccatttccactacccaatttccaactggtatactgtccacagaaaatttggagttgttccctaatgggaagccaaaaacatcagagtacaatcatggatggctcaagggtatctttgtggtgtggaatagtgatgtttcatagcctaagcctgtcatagaggccttggagctttcaatactgatgattgtgcttcataagtgtctcagagaagtcactgttatttttttcttgtattcttctagcactctcctcatggaggttatctcccttttcacagaggtcaattcaacatcctggctctgtatttgctgagtgtatgtcttctccatctgtttcatatggccttcagctttcctgaaattgtattcttgatagagacacacctgatgtaatgtccagaaggccaagtacttgggagctaatgcccaacactatctccagtcacagtccagccaataccatagctttatattcctgaattcagtgcggacaatatctagccttccagaaagtgtactgttgcaggcaggacagatagcaggtgaaccacaaaagtcaccactgccatgctgatcacagaagatgtgagagcagatggtgacccatgcataaccagagagttcaatgtgacactctcgataattacaaaacaacatgtcttcacacaaagacataataggatagtgaggtctccagatgctgaaaatagtccatgaaagaaatatgcagtcatcatccattgtatatctagaatttacagcactgaagaggaccagactgaaacagtaagactcagatctggttttggccttgaaattttacttctctggtatcagatgaatccagcttctatgtaggtatcaagttgaactacaggatctatcagctacttagcatcatctctttatagtcacatcagcctttaactcttcctttattgagaatttccaaatccaatcctgcttgattttcagggggtctgcagatgacctttcacagggccacttctggcctggcacacagggtgctaaagacccaggtcttacctcttcagtggatttcatcttcaacctgccatccttctccctttaggagagggagggttaaaataatttttgattatgagtatcatgtgatatttggcaacttactagaagttcaaagaaccaaatgtcatacttaaaactttttgtccctgtacacttacatattaaaagatgaattcctatagatttgtatttatcaataaaattgtgtttctcaatttttacaatgtgtttatttacatgttcattattattatatcattgaaataacaaatggattttaaaaattaattcataagaaaaaatttgattcctggagtctcatggtcacagtaaataatttaaattttaatttatgcatatgtttttaattgcatagcagtaggaaaatagcatgaatggcattgcctaggttgtctttcaggatttttatggttttgggtttaaaatttaagtctttaatccatcttgagttaatttttgtaaattgtgcaaggaaggggtccagtttcagtcttctgcatatggatagccagttatcccatcaccatttattgaatagggagtcctttccccttcacaatagcaaagacatagaattgacctaaatgtccatcaatggtagactggataaagaaaatgtgatacatacacacaatggaatactatgcagccatgaaaaagaatgagatcatgtcctttgcagaaacatggtggagctggaagccatcatccttagcaaactaatgcaggaacagaaaaccaaataccgcatgttctcacttataagggggagctaaatgatgagaacacatggagacatagaagggaacaacagacactgaagcctatgggaggttggagggtaggaggaaggagaggatcaggaaaaataactaatgagtactaggcttaatacatgggtgtcaaaacaatctgtacaacaaacccccatggcacaagtttacctatataacaagtctgcacacgtacccatgaacttaaaagttaaattaaaaaaagaaaatgacatgaataaaagacttctgagcataagattatattccattatactgaaagtctggggggtaagaggaatgaaaatatgagttcaatgaaaaaaattaatgttttaaattttctaactgttaaagaattgctttccatatattttaaatagatgcttgtgggtatcaaattagtatatttctaccccagtgattatatatattttaaaaaattatgtagcagtttaaaaaattaatatttacatgttcacataatgcattgagattcatttatgttgtgtgttgtttgttcttttttattgctgaattttgtccattctatggctatacaacaggttcatcctttctcttgttcatggaaatttgggttatttccagtttggggcaattatgaatgaagcccatacaaacattcgtatagaggtatttttatgaacctaagtattcatttctcttaaataaataccaggaagtggtattgccgggttatgtgaccagtgtatgtttgtaagaaactgccaaactcttttccaaagtcacagtaccattttgcattttcattagtaatgcatgcactactctcctaagagttccacttgctccacacacctgttagcgtttggtattgtaaatgcttttattttagtcgttctaatagatgtgcagtggtaagactgcatgctatttggagaaatgaaagtaattagcctacatttgtggaactctaagaatctaagccacttcaaatgttggtgggaagatttttcgtattttccaacttctcctaggacagctttcaaatccagttggttccttggtttctgagcctgcttgggtaggagtttctccagagccccatcattgaacctactttaaaaaaaagtcttcataatttccatactttattgtccttaaatcgttaattttaagtttaatattattccttttttattttccatgtctgattctctacccacaatctttttgttttcattagattttatttgcctttctttttccaacttgaaatggatcattggtcaatttcattcatttctcatttcctataatttacttccatttttatttttaatttgagacatacctctttcatcactgctttcattgcactttaagaaatttattttaattgactaataataattatttatatttatgtgctacaatttaatgttttgatgtatgtacacattgcggaatggttatatcagggtaattaacacatccatcacctcagatacttatcattttttaaattagaacatttctgtagcaattctgaaatgtacaatacattgttaactatggtcaccatgctatgcaatagatctcagagacttctttcctttgtctaactgaaactttatccccttaaccaacatcttccctttccccatacactccaccctgacccctggcaacggcctctgataaccaccatctactctctacttctacaagttcaactttttagattccacatgtaagtgagacatgcaatatttgtctttctctgcctggcttgtttcacttagcataatgttcttcatcttcatccatgttattgcaaatgacagaatttccttctttttaaaggctgaatagtagttcattgtgtatatataccacttttttacccatttatccattgctgaacacttaggttgattccatatcttggctattgtgagtaatgctgcaatgaacatagcagtgccaatatctcttcaacatactgatttcatttcttttggatatatacccaaatatgggattgctggattatgcagtaattctacttttagtatttttgaggaagctccacactattcttcataatggctgtactaatttatactcccaccaacagtgttcaagaattcccttttcagccaggtgcagtggctcacacctgtaatcccagcactttgggaggccgaggcgggcggatctcatcaggagattgagaccatcctggctaacgcagtgaaaccccgtctctactaaaaatacaaaaaagtagccgggcgtggtggcgggtgcctgtagtcccagctactcgggaggctgaggcaggagaatggcgtgaacccaggaggtggagcttgcagtgagccgagatcgtgccactgcactccagcctgggcgacagagtgagaatccatctcaaaaaaaaaaaaaaaaaaaaagaattcccttttctccacatcctcatcaacacttgttatgtttaatctttttgataacagacattctaacaggcatgaggtgatacctcattgtgattttaatttgcatttccctgttgattaatgatgttgagcattttctcataaacctattggctatttgaatgccttatttatttatttactaacttacttatttatttattttcaagacagtcatgctctgtcacccaggctggagtgcagtggtgtgatcttgtcacactgcaaccttcgcctcccaagttcaagcaattctcgtgcctcagcctcccgagtagctggaactacaggcatgcgccatcatgcccagctaatttttgtggttttagtagagacagggtttcaccatgttggccaggctggtcttgaactcctggcctcaagtgatcttcctgccttggcctcccaaagtgttgggattacaggcgtgagccaccgcgcccagcctttgtatgccttcttttaagaaatgtctattcaagtcctttgcccatttttaaattgagttgttttcttactatcaagtaaatggagtgccgtatatattttgaatattaacccctcatcatagtatggtttgcaaatattttctctcactctatgagttgtctcttgactctgttgattattttctttgctatgcaaacgctttgtaatttaatgtaatctcacttgtctagttttacttctgtttcttgtgattttagggtcatatccaagaaatcattgcccacacccatgtaatggagctttccccctatgttttcttctcagagttttatagtttcagccattgcagttagatcttttgtccattttgagttgatttttttaaatatatgcatattttgtatttcaatagcttttggggcacaaatggtttttggttacatgaatagattgtatagtggtgaagtctgagattttagtgcaccagtccccaagtagtgtacattgtacccaatatgtagtttgttttatccctctctgccctcctacactccgcccttctgagtctccaaagtccatcataccacctgtatacctttgcatacccataggttaactcaacttataagcgaaaacatatggtatttggttttccattcctgagtttcttaacttagaataatggcctccagctccatccaagttgctgcaaaagacattatttcattattttttatggctgagtggtgtatatataccatgttttctttatccattgagttgatttttttgcatggtgtgcaataagggttcaattttatttttctacatgtggatttccagttttcccaagaccatttatcagagacagtctccattgtgtgttcttggcacctttatcaaaaatcagttaaccataaatgtatagatttatttctgggctttctattctgttccattggtcaatgtatctgtttctatgacagtaccatgctgttttgattgctacagctttgtagtatatttaaaatcaggtagtgtgatgcctccagctgtgttctttttgctcaaggttgcttgagattcttggggtcttttgtgactccatacaaattttaggattttttaaatttctataagaaatgcaactggaattttggtagggattctgaagttatacactaacaagtggaataacctggaagaaattgagaaattcctagaagcatataatctaccaaaactgaatcatgaagaaacagaaaaactaaatagatcaacaagtaaggagatttaattggtaattaaaagtctcttatcgaagaaaaatctaggatctgatggcttcatgacttcattctaccaaacatttaaagaactaatgctaatcctcctcaaatgcttccaaaaaattgaagtggagggaattctttcaaactcattttatgaggccagcattattctaataccaaagccatgcaaagacactacaagaaaagaaaattacaggccaatatccatgatgtacacagaggcaaaaattctcaaaaaaaaaaaaagatcagcaaattgtattcaacagtacattaaaaggatcattcacagccaagcatggtgggtcacacctgtaatcccagcaatttgggaggccaaggagggcagatcacttaaggctaggcgttcgagaccagcctggccaacagggcaaaaccctgtctctactaaaaatacaaaaaaaattagccaggcatggtgacacatccccataatcccagctacttgagaggctgaggcacaagaattacttgaacctgggtggcagaggttgcagtgaaccaagatcgtgccgctgcactctagcctgagtgacaaagcgagactctgtctcaaaataaaagaaaaaaatagtatcatttaccatgatcaagtgggatttatcccttggatgcaaggatggttcaacatattcaaagcaatcaatgtggtgaaccatcttaacagaattagtgatataaataatatgatcatctcagtagatgcggaaaatgcatttgacaaaattcaacatttttatgataaaaaatctcaacaaattaggtatagaaggaatgtacatcaacacaataaaggccagatatgacaagcccacagctcttatacccaacagtgaaaagttgagttttttctctgagatcaggaacaagacgagaatgccaatttctaccacttttaatcgacatagtactgaaagtcctggccagagcaattagcaagaaaaataaataaaattcatccaaataggaaagaaagcgacgaaattgcctctgtttacttatgacatgatcctatatatagaaaaccctaaagactccacaccaaaaaaactgttagaactgataaagcaatttattaaactttcaggatacaaaatcaacatacaaaaatcagcggcatttctatacactaacaacaaactacctgaaaaacaaattaaaacaatcccatttacaatagcataaaaaatacttaggagtaaatttaacaaaggatatgaaagatctgtacactgaaaactacaaaatattagtgaaagaaattggagaagacataaataaatgaaaagatatttcatattcatatttcatatggattagaagaattaatattgttaaaatgcccataccacccagaacctatctttttgcccagcttccccaaatagcagaggttgcactttgcaggaaactgagcagcattttgcaattgaaaggtctacagatggccaggagctgggggagcagtgtgaattcccaggttacaatatttaggaactacaggtaagggcccactatgactctattacatctcgctaccctctagttctccccagttaggcgcttgcccagccccaggccctgtttccatggctgagagctcctagctcacacccctcctcatccccatagcatagcatgttctgttgcaaggctactcaaccagatatgtgcctctagcctcagttactaggaagcagaccttgaggaggacaactagctccataagtcactttaatacaccttgccctaagttcaggctgagtaagtaagtaaattagtaagcctcgtccaaagatattttcttctaaatgctgcctagtcagatatctacattctgataccggagaaggattgtctctaaatattgagtacagaacactccgtacatatctccatattgtgctgctaaaatattttaaatcttttacattttttgtccttttgatctgtcaatgattgagaaaggtgtgtcaagggccctcaatacagccatagatttctcaatttatgcctataatgatgtcaatgtttgctttaatatatcctgatttgattggtttaggtaaatacaaatgtattcctggtgaactgagtcttttaccattatctagcaagccatcctttatccttaaagataaaacttcgtcttagagttttctttttttttttcagacagtctctcactgtctttctcccagggcggagcgcagtggcacgatcttggctcactccaacctccctctcctgggttcaaatgattcttgtgcctcggcctcccaaggagctgggattataggcatgtgccaccacacctgtaatttttgtaattttagtagagacggggtctttccatgttgcctaggctggtcttgaactcctggcctcaagcaatctgcctgcctcggcctcccaaagtgttgggattacaggcgtgagccaatgtgcccagccttagagttttctattgcctaatattaatcaaactatactctctcttctttgtttgcatttgcctagtcttttttccattcttttgcgttcaaccattctacttatgttttaagtttatccttcaaatcgtgtaaatctacattgtaaaaatccagtccagaaattattacctattaattgacatttatgggcactaatgacatatttggattcatttctacaattttattacaagttatctactctcagtcctcattattcagattctgtacttgccaatttgcctacttgctgaaatttatttattacccaaaaatcaatactcatgatgcttttgtggtcattcagggatatgtgcagaatggcaaaaaatttgagtcccccaacgtacacattcccagctgaagtcaaacaaggcaacgctctgcttgtttaagctcttctactactataaacaagcttcctttttgcagtctacttagtgtcacatttttcacatttttgtgctttttgttggtgagtttgctgtttaaaatggctgccaagaattactaaagtgctgtcaagtgtcctaagagcaagaggcctgcaatgtgccttacaaagaaattacttgtgtcagataagcttggttcaggcatgagttacagggctttcagccacaattcaatgttaatgaaacaataatatatattacataaggtgtctttttttttttttgagatggagtctcactctgtcgccaggctagagtacagtagtgcgatctcggctcgctgcaacctccgccttctgggttcaagtgattctcctgcctcagactcccgagtagctgggattacaggcacccaccaccacgtcctgctaattttttgtatttttagtagagatgaggtttcactgtgttggccaggatggtctcaatctcctgacctagtgatccgcctgcctcagcctcccaaagtgctgggattacaggcatgagccaccgcgcctggcctatatacatgtttaaaaaataaagacagggccagcacggtggctcatgcctgtaatcccagcactttgggaggctgaggcaggcagatcacctgtggtcaggagttcaagactagcctggccaacacggtgaaaccctgtctctactaaaaatacaaaaattagcctggagtggtggtgcacacctgtagtcccagctactcaggaggctaaggcaggaggatcccttgaacccagaaggtggaggttgcagagagccgagatcacaccactatgctccagcctgggggacagagagagattccctctcaaacaaaacaaaaaaaataaaaataaaaataaataaataaataaagtatgtagagttttatttaataattaaccacacagattaaaaaatagaaagtagccagcttcccagaagtcttctgtgtgcaccttctaattaccatctctgtcatgtgtcttcagacagaagcacatataaaaacaaggttatgtattgatcaaatgatgaaaatgtgtggtcagaggcttgcattttccctaggagcaatggctcagtatttgctaatccggtgttcacagtgactttacagaacataactacccccaagtaatgggaatcaactgtatttttattactttggtgtacaaagaactttgagctctccatggcttgccacaacaaaagacttcctaggcaaattgtctactgctttgttccaagtgggggctctacttgaggctgtgggaccaagacaaaagaagcagcctctatgtggattaggccccttctcctggcagagagaaagcacaaaggagctggcagaaactcacagtgcaaaactcactatgcatatgctacatctgctcatactccaataggcaaagcacagctgacagcaaacccaaagtcaatgagacagaaatgtgtcttccttccacgggccgttctaaaattgcaaggtaatggacaggagtgtcctcttaaaggaaagatggaatgaatagttgtgaataataatataacccatcactactactcctgttttaattttttgaaaatgtttagatacatattatatgcttgtttaatttaaaatatcaaactttaccttgctcaggctctgcccctccacactgggccactcaaagatgcccaacttaccctacttgggctccaacagccatatcaggttgcattcgagaccagcctggccaacatggtgaaaccccgtctctactaaaaatgcaaaacttagccgagcgtggtggcgcacacctgtagtcccagctactagggaggctaaggcaggagaatcgctggatgcattgatgccctcttcaccctgcttaggctctgattcctgacacaagacagctctgttctgtggaacccctcctcactatgcttggcccaactccccacagccgaccactctaacttctatgtatcctcctcatctccttgggctcagaccctccatgtctggctacccacccccatagacaccctcctcaccctccttcagttcggacagtccacatcaggcctcttccctatggagacagcttcctcactttgctccagctctaaggctcctccctcatctgctcccctgcctggacactctgctcaccccactcaggctctcattctatgccagtctgcccctctagccccagggggatgcctttctcaacatgggcaggctggtctccatgctatgctgcttcttgcctcttcactgggcattctcatctacccctggctccagcacaccaggccagcagccctcctacagagacaccctccttgacctgttccagctctgatgcccacacggagccagccgtggctcccttccccttggggcaaacgcctaccttgctaaatgtgcctatctaatggctttaggactgactagttcagttagtaaagaaaaggagacaaaacaaggaagagctacttttcctttttgtaaaaatatgtattgtgaaaaacaccacaaaaataaaaatatgcatgaaacattaatgttcagtctaacgaactattacgaagtgaccactcattaaactatcactgaaatcaagtaaaaaatttccaacactttctgctcctttttcattcttttccagtcacaaccccttcctatgctctcaaaggcagctaatggtagtgactttctttttcatattttcaagatcatatgtattcccctaaatatgtttttgtttttgtctgcttctgttctatatcaatggagtcacttggaatgtattcttttgtgcctggctttttgtgttcaacattatattaatgaattccatccacattgttttgtgtagctgtattttgtcaattttcattgccatgccatctattgtatgactacacacatctctactgagttgtttatagtttgcagctgttaagaataaagctgctgtgtgtatacatagcatgtatgtaataacgttctgcacgtgtatcccagaacttaaagtataataaaaaactaggattttctaaataaaaatgttatttatatcaacatgtaataagtttattacgttaaatgaattaataaatgtttttaaatgtcaaaaaaattttaaacaatttactcatgtaaaaaaaagaataaagctgctatgaacactctgtgtgcatttgctggagcacgtgggcaggtgttcttgtaggttatacattcagcatagggaatgatgggttacagggtatgcatatcttcagcttctcaagctgataccaaattatttcccaaagagtttgtaccaattcacagccttgccattggtagttgagagttcctattgttccataaccatgctgtatgtagaactgtcacaatcttttcatttttaccatcctgctacgagtatggaaatacatcactgtggacttaatttaaatttcttgactactaatgaggttgagcacctttttagatctttattaaccacttggctatcctctctttgattttcttttcaaatgttttgctcattgttctctggggttttctgactttttcttgctgatttctactggagtcatgtctttcctcagttatatgtattatgaacatcttccaggatcaagggtaatcttctaaaacccttattggcttgtcttttaccttttgaatgaaagtttttatcacgtgcccttcctaccccaaagacagaatcaggaatcctttttctatgttcctttcctacaatacaataactcgctacaatacaatacagtaactccaatatctgaagtctttgtggacctctgctgttggttgtttttcttgatttttttcatcttgttttcttaagatctgtgtgattttttttattgtgagagtacatatttaatggaagtttatgtatgtaacaatactttgtggaatttcttggattcctgtgtttaaaggagaattcttccgaatcaacttgtcctcaatttttccctaacaactcatgcaattttgaattaaattcatagctttagatttatcagaccatgcacatgtgccaattttcctactctgctcttatgaaaggaaacaaggttgcagttacaaattctcagaatagtctttttttttttttttgagatggagtctcgctctgttccccaggctggagtgcagtggcactatctcaactcactgcaacctccttctcccgggttcaagtgattctcctgcctcagcctcctgaatagctgggattacagacacgcaccaccacgcctggctaatttttttgtatttttagtagagatggggtttcaccatgttggtcaggccggtctcgaactcctggcctcgtgatccacccacctctgcctcccaaagtgctgggattacaggcatgacccactgcacccagcccagagtagtcttttttcctgttttgttcagagccaaagccaagacaggcaagttccttcaccacagttgtgcatgtgtgtgtttctgtttcatccatttatttctgtttcatccatttattaaggtgtcagcatttggtgatccttgtgagtgagatttctgatctgacttttcacattgcttagggcttagctcttttttcttgcccttgccaggggcccactaaaattcaaactgcagattaccaggcattggcagatactcccagggaagcctctaactaaagcacttccttatctctctggagtcagaccttcacatcatttttggcttttaagaattcctctttcttgccaactgactcattgatttaaagagtcatgcattttaagtattttagacaatattttgggggggtgatttactgggaatagtttctaagagtcctagttatgaatttttaattataaaattacacacatcaaatacccaataagtgaaacagtacaaagaacatataaagaaaaggtaataatttctaagccacatctctccatttctaactccctcaatattaatagccttggttgataattaataaccaattttaatgggctgttttgtacccttaccatctttctctgcgtccaaatatatacaatcatgtatgtatatgggttctgatacttggaaaacaaaatgaaattatgatgtatacattcactactactgtacttgcttcttttcacttaactctacctcatgtaagtccatccatataaaaatgtagattgaaaattgccttaaatagatgcccacactctgttcaacatctctgctcttaaattactgctagtcttatggaaattgcagagttgcttaatttgcatatccccaactactactgatattaatcttctttgctttttaaagttttttagttaaaaaatttataattgacaaataattttatatatattagtgtgatattttcatatacatatacttatattgtgaaatgattaaatcaagctaattaacatctccatcacctcacatacctatctttttttgtgacaaaaacatttaaaacctactctcagcaatcttcaagtgcttttaattatcggccatttgaattttctctttcgtgaactgcttgtgcaaatctttttctattgagatgtttgtcattttctcatcaatgtgtttattagaaaaaataacttctggctagtcatatgtattgcaaatatttccctcagcctgtagtttgatttttatttattatgtgttttgttctataaaaatttaaagagttatgtaatcaataatgcttattaatttttctttatgtcttacatttcttgcttaagaagttctctccaatgctaacatttgagatcattctcctaatttttctcctaagttatttatttaaaaaaatctaacacataggacagagatttctacttttctgggaaaatgaactagatggacttttctctattcctctgatgaaattcagctaaaaatcctggacattaaatacacaagaagattctgaaaggtaataagggcaaggcagacgagccagaaaccttaagacctgaagaacagcacggcagcgggattactgagttttctttttgcctcacatattcaagactgggtgctagagaagctggaaacccagaaacacagaaacagagacaataaaagcctcaaaaacaaaacaaaatgcaacacaacaaaaaaccagcctgctcactcttgccaaaggaccaggaaagaggcagcctaataagacggaaaacattgaacaataaccactagtatagccaaacacgtagttccacccccatcagagctgagagaggagcctcaacttctgcctttaccaggctgaaaggaggagccccagtctccctgcaaagagcccagactttggtcaccaccagacagtaatgatgctgccttcccccaatgcgtgtgctgtcagtggaggccgtgtggggagcagaaggatacttctatccctctctgctagagaggtatcagtggaacttattgaggagctagacctcccaccccagcccagaagtaatgagaggaaaccactcccccaactcagttgtcaacaaagactcaatggggaacctgatttctacccccatccggcagtaatgaggtggtgctccactcttccctgctggaagggtgacagaagaaatcaaggtttaaatgagatctagaatctcataaaataaaacccaaagtttccaactttcaatacaaaattatttgttatatcaaaaaccagaaaaatctcaaacaaaatgacagaagattattaataggtgccaacactgggatgacaacgatgttataattatatgataaaaattgtaaagaggtcatcataaagaagcttaaaggagcaattataaacaaacaaagatattaaaacagaacgtctcagcaaagaaatagaagatataaagaagaaacaaatggacattttagaaaattttaaaagcgtataactgaaatacaaactcaatggatgagcttaacagccaaatagagagtatagaggaataatctgtgaatttgaagatagaactttcactcacatccgtgtgaagagaccaccaaacaggctttgtgtgagcaataaagctttttaatcacctggatgcaggcgggctgagtccgaaaagagagtcagcgaagggagataagggtggggccattttataagatttgggtaggtaaaggaaaactacagtcaaagaggggttgttctctggcgggcaggagtgggggtcacaatttgctcagtaggggagttttgagccaggatgagccaggagaaggaatttcacaagataatgtcatcagttaaggcaggaacaggccattttcacttcttttgtggtagaatgtcatcagttgaggcaggaacaggccatctggatgtgtacgtgcaggtcacaggggatatgatggcttagcttgggctcagaggcctgacattcctgtcttcttatgttaataagaaaaataaaacaaaatagtggtaaagtgttgggaaggcgaaaattttttggggtggtatggagagataatgggcgatgtttctcagggctgcttcgagcggcattaggggcggcgtgggagcctagagtaggagagattaagctgaaggaagattttgcggtaaggggtgatattgtggggttgttagaagaaacatttagaattattggtgatggcctggatacagttttgtatgaattgaaaaactaaacggaataagagaaggagaaaaacaggtattaaaggtctaagaattggaaggacccaggccatctaattagagaatctcctaataaggagattcagcatagtcctgccagcaaagattatttatttactttaagagttaagagtggcagtttggagatagcactaggagatatcagctgtgatggcttggagaaacagtgtaagccggcagtgtaaacatattgtctagtcctttttaagttagtggctgagcttggtgaggtgtgtttttaaaagacctttagtccgttctacttttcctgaagactgaggactgtaagggatataaaggtttcactgaataccaagagcctgaaaaactgcttggctgatttgactaataaaggctggtccgttatcagactgtatagaggtgggaagactaaaccaaggaattatgtctgacagaagggaagaaatggctgcggtggccttctcagaccctgtaggcaaggcctctacttatctagtgaaaatgtctacttagactaagaggtatttttgttttctgactcagggaatgttgagtaaagccaatttgccagtcctgggcaggggcaaatctctgagcttgatgtgtagggaagggaggaggcctgaataatccctgaggagtagtagaatagcagatagaacactgagaagttatttccttgaggatagatttccacgatggaaaggaaatgagaggttctaagaggcgggctagtggcttgtactatagcatagcctgcctttgctggtgtgtggtgattaggcctggtggaactaccatcaataaaccaaatgtgatcagggtgaggaacaggaaagaaggaaatatggggaaatggggtgaatgtcaggtggatcagagagatacagtcatgggggtcaggtgtggtatcaggaataatgtgggaggccggattgaagtccgggccaggaacaatggtaattgtgggagacttaacaaagagtgagtacagctgaaggagccagggagcagaaagtatatgtgtcaggtgtgagaaagaaaatagattctagaagttatgagaagtgtagagagtgagttgagcatagtttgtgattttaagggcctctaaaagtattagggcggcagcagctgctgcacggagacatgatggccagcctaaaacagtaaggtcaagttgtttggacaaaaagctacagggcgtggtcctggttcttgtgtaagaattctaactgcacagccctgcacttaggctttgggtaatgaaaagggttgggatgagtcagggagagctagggtgtgggcagtcactaaagctgtcttcaaggaacggaaagaggagtggggaaggatttaggatctatagggtcagctagttttccttttgtgagtttatgtaatggttttgttaggatggcaaaaccaggtatctaaagtcgaaagtatctaaccatgcctaggaaggaaaggagttgttttgtaggtgttggggtttgagagatcagctgaacacgatcggcagggagagcacgtgtgtttttatgagaattacactgagataggtaacagatgaggaagaaatttgggcttgactgaagtaatgggggctatctgtgaaggcttgcggcagtgcagcccaggtaatttgctgagcctggtgggtgtcagggtcagttcaagtgaacgcaaagagaggctgggatgaagggtgcaaaggaatagtaaagaaagcatgattgagatccagaacagaataacgggttgtggagggaggtattgaggataggaaagtatatgggtttggcatcatggggtggataggcaaaacaatttggttgataaggcgcagatcctgaactaatctgtaagacttgttcaggttttggacaggtaaaatggaattgtaaggagagtttataggttttagaagcctatgctgtagcaggcgagtgataacaggctttaatccttttaaagcatgctgtgggatgggatattggcattgagcagggtaagggtgattaggttttaatgggatggtaatgggcatgtgatcggttgccagggaaggagtagagatgtcctatacttgtgggttaagatggggggatatgagaggaagaggcaaaggaggctttgggttggggagaagggtggcaatgagatgtggctgtagtccaggaatagtcagggaagcagataatttggttaaaatatctcggcctaataagggaactgggcacttgggggtaactaaaaaagagtgcttaaaaaaatattgtctaagttggcaccagagttggggagttttaagaggtttagaagcctggctgtcaatacccacagcagttatggaggcaagggaaacaggcccttgaaaagaaggtaatgtggagtgggtagcctccatattgattaagaaggggacggacttaccttccactgtgagatttacctaaagctcagcgtccatgatggtctatggggattccgaggcgatcgggcagcatcagtcttcagtcgctaagccgagaagatctgggaaggagtcagagagccttgggccagagttccaggggctctgggagtggctgccaggtgagttgaacagtctgattttcagtggggtcccgcacagacgggacacagcttaggaggaatcctgggctacggcattccttggcctggtggccagatttctggcacttgtagcaagctcctgggggatgcaggcctggaggaatgcctggccactgcggtttgggcatttggaagttcttgtatgctggagatgtggctggggtttctctcagagtggaggcaaggaattgcaactcagaaatatgttgttacttggctgcctctactctattattgtacaccttgaaggtgaggttaattaagtcctgtggtggagtttgagggccggaatttaatttttggagttttatttaatgtcgggagcagattgggtaataaaatgtatattaagaataagacggccttttgaccttttagggtctaggctgtaaagcatctcagggttgctgccaaatgagccatgaactgggctggatttttatatttgatgaaaaagagcctaaacgctatctgatgtgggataaagaaaaaggagcattaaccttgactatggctttagctccagccacctttttaagagtaaattgctgggcaggagatcatgtatggttcttccaagattgccaaggtatcctccaactctcactggtggtttcggggctcaatgcaggaaatcatattgctgattttctagtccaacttgctgttctctagaagagagaaggggtaggaattcagtagccacacaatctggtaaaaacatatccatttaagcataactaatcctcccaaaccctgtgggcagggatgtttttctgtggctcaagagatgcccacacaaggattctcccaggatgttttaagttcaatgagcagagacataaatgccagatctcctagggtttggctaaatcaagcagacctacaagaggagtgtggggagtctggggataggatgaagaagcagaggccccagattggattggctgggactgaggaggcatagcatcctgctgtctgtctccccacaacctaagagtccataatttttgagaactggatgaagagggaaaggtgcttcttagatcttaccatcttcaagaagcatgcagacatttccgcagaagacattactgcattaatgatgaatttgagattctgagtgtaacttgcagaaggttctgcctatcagtgagaatctgtgtggcatttcagttttggctttgataaaattgaggagtatatgagcagtaacacccaggagggtgtttctcactattatcagcccctccaatgctccaggacccactccattgatttcccttcttcctctccccagcgcaaggatctgggtggttttctttgttgttgttgttgttgttgttgttggcttctggagtaaagttccagtccccaatcatcctcccttcaacaactcagctgctatgacgtcacctctatggaatttaaactcacagaacctgagttcaattcttagagcaactagttctgaggcactttctagtcccccattttacaggatgggaagaattgaatctcaaagtagggaaaaaactttccttccaccttcacctctccacttctggctgaaatggccctgaaagactcagctcttccctacccatattcatcatgcaatatctactcaccaccttaccttcaattcttctgaagatttcacttttgttatcccagtggctccaaacttctctccatcaagcatgcattttatttctcctttttatgcccaatgttttgaaatactcaatcctaataaaagggcatgtttcaagaaataattagtagtcctttcccaatttggtgttcctctttggaactcttaactgaggacataaactcctaagtttatgtcctcctcagtttatgagctaggaaccctccatgcaggctctgaacctggtggagctcttccttggtaagtgtcctcctagacaaaaactcagtgaggccaccactgtcccccaaacacagataaaaacattgcattacttgcagcatcaggagatcctcaagcctgagaattaaacatttagttttcttcagggattctgacttttttaaaaagctgtgtttttatgttgccagcccctggcacctctctgcaataggactgtaaaagtctttttgttttccacccactcttcattttgaagcccagccagaatacatacagtaatctgaaaattccattacaggaaaaaactctttctttccattctcctgacactggcagaaccacaatgccaaggagtatcagcaatttggacatctgagtaaagctggcaggagactcaggattttaccaggctctgctgggggtagaaaagggttccagatgaggagtttggagaatgtgtgactcgactctcactaccttatctggttctgcctcctccactcctctggccatcactccctgggtgggcactggcttctcacaaagtacttcctttttcttatagctcatacacctctcattgcagaaataaattctccacacttttttttaatttttgaaatttgaaaaatatacatttgaaaaacagaaaagaacaaagagaagtaatgagatagtagttattccttacctagagataataactgttgataatttactacgtgtccagatttttttactgtatcaatacatatatcatctgaatttatatctaatctttacctctactcatatataatctatatatatgtgtttttcatcaaatatgcctcagattatacatgctgtttctaacttttttcatttaatcaaatattgcagaaataatttattttctataaaatgattttgggagcaagtactgttttctttatgtatactgcacacaagtgcataaatcattagtggatttttactacatacatacccatctagacaccacccagattaagaaagagatcatcagataatattcctcttctctcatccaagaaaaggtcatcgctattttaaattttatcaccatcaattagacttgcctattttaaactttatataaatggaataatacagtgtgtattattttgtgtctggcttcttttgctcaacatcatgtttggaaagtccgtctatattgtggatgttgttcattcaatttcattgttatataatattccattgaatgaatataatatttaatccattccacttttgatagatatttggattgtatccaagttagagtcttatgaatgtttctatgaccacttttatatatggcactgggcatacatatagatattcctgttgggtatatacctagaagtggaatttttgggtcataggatatgcatatgttcagttttaggagatctgccaaacagttttccaaattggttatatcagtatacattctcatcagcagaatatgagacttccagtgatgctgatttttctgcaacatttaggtttcttaaaaactttttttttttttttagatggagtcttgctttgttgcccaggctggagtg[133 bp omitted]gacagggtttcaccgtgttagccaggatggtctcgatctcctgacctcgtggtgcacccgcctcggcctcccaaagtgctgggattacaggcatgagccaccgcgccctgccttaaaaaatctttttcattttagcccttctgttatgtgtgtgttttgtgatttgaatttgcattttcctgataactaatcaagttgggcacctttttattaccttttattgaacatttggatattgtcttttataaattggctggttgaatctttttgctcatttttcaattttatgcccttttcttatttattacacattcttatataccctggatatgagtcccttgataaatatgtatattacaaatatcttctctcactctgtaatttgctttttcactctcttttattttttaataaacagaaattattattttaatgtagttcaatttatccatcttttcccctatggttagtatttttgtttcccatttaagaaggatttcctgccccaaagttatgaagatattcttctgtgttatcttctagcatcttacgttatatttttgacatttaaatctatagtgtaacttacagatttaaatatatactttaatgtatgtttttacttcattcacttttttctttttattattttcttccttctaacttccactgtgatttttatttctttttttttgttctgccaatttttgcttaatatatttgatgccgtattactagataaatcacatttcaaactactatttgtttgtggtggattgacaatttcatcatcatgaaatgtccagttttatctttaataatgcttcttgctttaaaggctactttgtctgatattaacatattcatactcacagtcttttgttagcatttgcatagtatacttgcttacatccttcaactttcaaaccttaaggtagatctttcaaaccttatatttaagatagatgtcttaagctgcattcgttttgtttattcactctgacagtctttgtcttttatttgtaatattaggtctgtttgtatttaatgcaataaatgatatatttgggtttgtatcaaccaattactatgcaatttctattgtccaacagctgttctatttttctttttatccttcttgcactttggattaatcaagcttttttcctataatttcattaacactgcccccctcattgacttgttagttagttattctcttacattacaaaattcatcttggacttattagggtataaaataaaatttgcatcccaggcaatgcaaaaattttcaaacattttacctccaagtactcacatcttttgtgtttttttttaatgtaccataattctacataaatctaaattccatggaaattactattgactgtataatcaatagtaacttaaataaagatatctcggttttggccctgttgatgttttgggccatataattatttgttgtaaaaggctgttccacgcattacggatgtttagcagcatccttggtctctatccactagatgtcagtagcaccaacccccaagttgtgacaattaaaaatgtcttcaaacattgccaaatgtcccctagtgggcacaattgtcctgacttgggaaccacagattagatttacccacatattttccctttctgtttttcttcattccttcttccattttcttgttcatcatttgcctgcataaatctctgatatttcatttcttttcttttctttttttttttttttgagatagagtctcactcacccaggctggagagcagtggcgtgatcctggctcactgcaacctccatctcctgggttcaagcaattctcctgcctcatcctcccatgtagctgggactacaagcatgtgccaccacacctagctaatttttgtatttttagtagagacgaggtttcaccatgttggccaggctggtcttgaactcctgacctcaagtgatacaccctccttggcctcccaaagtgctgggattgcaggtgtgagccactgtgcctggcctgatatttctttccatgtgaaagtgctggtgatgaattttctcagtctttctctgaaaataccttagttctggtcttatttttgaaagatttttttcttaggtatagaattctaggttagcattattttccatcagcaagttgaagatatcattccattgtcttctccctttcattatttccattgggaagacagctatcagtattactgttattcttaaaaaggcatgtctttttttctgtcagattttaagatttttctctttgctttggcttcaagtaaaattaaaacagatatacctacatatggttttactgtgatgtgcctaggtgttcactggtctcaggcggcttctttaatatgtagcttgatgtcttatatcagtttaccaaattctcagccattttccctttctttgctctattctgtctttcttctccttctgcatctccaattacacatatgttagttctctcactatatgctatatgtcacattcattcttttctatactttctagtattattttcctctccctgttttagtctggatatgttctgctaacttatctttcagtttgatcaacctctcttcagctgggtccaggcttctctaaatagcatacactgattattttatttttatcattgtatttttatttttgggattttgattattttcttttttattataatgagtctcttgaatacagcacacaggtggattttgactctatctggcttgccactctgtgtccttaaattgggggcatttaacccatttacatttaaagttaatattgttatgtgtgaattgtatcctgatatcatgatgcctgttggttattttgcagacctgtttatgcatttgcttcatagtgtcactcatctgtgtgtttcagtgtgttttttgtagcggctggtattggtttttccttccatgtttagtgcttccttcagaagctcttggaaggcagacctggtggtgacaaattccctcagcatttgctgtctgaaaaagattttatttctccttcacttaggaagctcagctgggccaaatattaaattctaggttggaaattatttgctttaagggtgtttaaaattggcccccgatctcttctggcttgtagggtttctgctgagatgtctgctgttagtctgatgggcttccctttacaggtaacctggtccttctctctggctgcccttaacattttttttttcattttgaccttgtagaatctgatgattatgtgtcagggctgatcttctcatggagtattttactggggttctctggatttcctgagtttgaatgttggcctgtcttgctaggttgggtgagttttcctggatgatacactgaagtgtattttcctacttggtttcattctcccagtctctttcaggtaccccatcatttctaggttcagtcttttaacatagtcccatagttcttggaggttttgttcattccttttcattctttttttctctaatcttgtctgcctgccttatttcagcaagatagtcttcaagctctgatatcctttcttccacttggtctattcagctattgatacttgtgtttgcattatgaagttctcatgttgtgtttttcagctccatcagatcatttatgttcctctctaaagtggtgattctgattaacagcacctgtgatgttttatcatagttcttagcttctttgctgtgagttagaacataatcctttagcttggtgaagttctttattacccatcttcctaagcctacttctgtcaattcatccatctcagtctcagcccatttctgtgcccttgctagagaggtgttgcaactctctgaaggagaagaggcactctggctttttgagttttcagcattttttctcatcttcatgggtttatctacctttgatctttgaggctgctgacatttgaatggagttttttatggtgcctttttcattgatgctgttgcattctgtttgcttttattttagcagtcaggctcctcttctgcagggctgctgcagtttgcttgtggtccactccagttcctatttgcctgggtccctcccatccctggagttatcaccagtggaggctgcagaccagcaaagatgccaagctgctccttcctctgagagctctgtcttagaggggcactggcctgacgccagctgaaacactcctgcatgaggtgtgtggagactcctgttgagaggtctcacttagtcagcaggagcagggtcagagacctgcttaaataagcagagtttctgccccttgaagggtgtgccacactgggggaatcaccctcatctgggctgccctgactctccagagccagtaggcagaaaagacagatcattgatccacaataccacagctgtccctcctcctaggaggtcctctcagggttatcagtgccccatccataaacccctggctggggatactgagattcccactgggaggccccaaccagcactttgggaggccaaggcaggcagatcacttgaggtgaggagttgaagaccaacctggctaacatggcgaaac[131 bp omitted]gccactgcactccagcctggacgacagagtgagactccgtctcaaaaataaataaattaaccctaatgaataaagctttaattgtggggcattcagataatggaaaattgtccttagttaggggggacttctgaaagcccttctcattttgtccctgttgacacaagcaacattgcctttgcttggcatgaaacccagcagcagggcctaggcacagagatcagctccctaactattctgttgatgcaacagcatcactggatgtctcatatctgagatactgctgatctgttctcctcttggtttgggcacaaaccatgcagatgggacattagtgatgttccgatgatgcagtgtcccaggtagcaaaagcaataaggcagaggttgatccgagtgagggtaggaatagggcatggagtgatgctctggattcttggcctctgcacttagcacaaaggaggagtgtctggagcagactgacaaggaacaaaatagttccaggagacaggtgccatgctgctgcttatttgggttgaaacacaccagcctagattagtgtttctttgaacaactattaataatatttgttgcttggaacaatagttgttagttgtaactaataaatctattgcttacccctgctatacccatgggatacaccccaccccaccttcatctatccattacaaaaaaactcctgtgttcccacagaagtcaaaacagatatttccccccctggggaatgctcctgataaaatccacagtactgcagatggagggctcctagacttaaaaagactcttcagggcactatgtgaaaatagaagagatcctctgacttgagacagagcaagaacctatggggaaattctagactccagaaaagaatccagaccttttatatccattataagagggagcaaaaggaaaaaagaaagtacagaaattccaaattgaacaccaagttcacagtccagtgtgatgtcagaactggggaccaggcagagcacatgatgtcaaagtaggaaaacaggatttcattccttctcttcttccctctctgtcagggtccagagagagcctgggctgggtctattttctccaggataaaaatatatatacactcaaaagtgtcccaattccttctttttttttttttttttttttttttgagacggagtctcgtgctgccacccaggctggagtgcagtgtc[131 bp omitted]tttcaccatattggtcaggctggtctcgaactcctggcctcaggtggtctgcccgcctcagcctcctacagtgctgggattacagatgtgagccaccgtgtccagccccaatcctttcctgtttctcaaggccatgtttacatttagcatgccccagggaccctactctgaacctctcaccatcaacttcctctctaccctctccccttaactcataggtactgactgtgagtccccttatgctttgttatcatgctctactctggactctacttgtctatattataaaacttataatgctgaaaggcatgtagctaccttatccatctgtgcatgaatacctagtcccttttcctatagagaggtatcaacccaggcacacagtagcaattttataacctcctgttgattacttaatggaagttattaaattttaaaatgagcctattacaggttatgtggatcctgaaagagtaaatgaccactagtggaaatgaaatcaactaggcaaaaaggacaaatctaatacttcttaaaccgaggaataggtaatagtacctttgagtactgctactttgaaggctatccttccatgaaggaaattaaggacaactagaggaaacagaggaatggtcttaagaaaggaaaaaagagggtaaggataaatggagaagcaagttgagggcacctgtggatcagttatggggatatgcccatatacgggtggttgcttcctacagatattgggtacatgtagaagggagaggtctttggggacctggtcgagaaaaagtggctatgtgatgagtggcagggatgggaagtcagtgaagaagtcaaagctcttggacagaaagaagagtcaggtacgtggctttaatgagggaagctaagggtgctggagatggagtagtagaagcagaaatcctaggtctgcttgattggaatatcaaggctgggatattctctcccatggaagtgggtccaggtgaagcaaggaggtaaccctgtctccctctcttcctttcccatctcccactgatggatcacaaggccaggtaaccttggccatttacttgtcagtccaggcacatctctctctggtcaatgtagaaatccatatatgaatccatttggaagtgcctgaataataatccacctgttgggattgtgtcagggcaggtaggtatgtacaacaggctgaggaaccttgagaatctacccttttcaaacttaacaacccttctagactccagaatccatggatttaactgcttcttaagaaagcgtcctctttgtactctccaagtcctgtgtttgcttaaactcactccctttgcctgatctgctcctgcagtctcccacaggatccacaatgtgctggcctctagagcttccctatttccccttggccaaaatgaaatctacttttatcatcccaaactctaatgaagtcatccagtgaaatccatactcatagaactcgagatcccaaaagagcctgagagttcctctagactctcacccatatcttatctctccctgactcttattctctctctactgtcaatcactcactccagtcgtcttctagagtccttctttaaccttctttccaacctcttgacctttccactattactagtgtcatagctcataagtatccagacttcaccatcttctcccttttcttcagcacaaagtgaatgcattaagaaataagtaatttttttttctcccttggaagtgatcaaagctacatacaactggttctcgaattcttttttttttatacagagtcttgctctgtcgcccaggctggagtgcaatggctcgatcttgactcactgtaacctctacctcctgggctcaagcaattctcctgtctcagcctcccaagtagctgggattacaggcgtgcaccaccatgcctggctaatttttgtatttttagtagagatggtatttcaccatgttggccaggctggtcttgaactcctgatctcaagtgatttgcccgcttgtggttctcaaactcttgacacatcagttgagtggcagtgtccaccgtgccaaagccttcccaacttcagatgacctgacgttttctttcgttttgcgggggaaatgtaagtaaaagttcctggaaatttctcagttaattcttacaggtctggaaggtggtctgtaaggaagtctttggatgaagcttgaaaagggtgcaatactcatcaaagcagtgagttcagcaccaggcagattgaatgtaccaccttctctcccctcttcaggtcctatccttaccacccatgtggtctcagggcttgggtcatctagtatgaatcacagcaaaccaggggtcatagaagttagaggtttatgatattaagtatatgtgcatcttagtgatgggtgcctcttggaatagtgaggaagaagggaggaaaaatggagaaggctgtgccacacatagaccaaaacaagaaggccctctctttgaggggccctcctctagctctgtcatttccccatagagcaaaaagcttatggaaccaagaggatgctcacctggagactgcactgccgcttctagattaccatgggtagcaagtacccaagaacaccctttccaaatggctctaagcccatctccagacctgtgcaggcttttcctaagatatatcttccaaaaaatggaccttgtcattggtgtgcatatacctgaacccaagcattggccaaggggcaacggtttgcaggtacatgtggagaaagcttagaattgtgggcttttgtgtctactagactgagctttctacccattcctccatatactcctcattattttctttttatgattacaaaagcaatccatatttattgtagaaaatttttcaaaaactgaaaaacaataagaagcaaatagaaaattaccagcaatttaatgaccctgaaattatcatgttatcattttggtgtatatgctccatgtagtgcatctccatggggtgtgtgtgtctctgtgtgtgtctgtgtgtgtgtctgtgtatctgtgtatgtgtgtgtgacctacacacaactaggcattccctagtggtgccaaacaatcaatatcttttatgggccctccgttaaacatcgctgtactcacaaagaaacataaatccaattctataaatattgggaattttactgatggtaaaattaaaataggaggaggaggttacatcactatcatatggtaacattcccttaaaaatcatctctttatctttcctaaatattccactgtctttgactgctatacctctctctcttttctttcaccaagcctctctctttgctttccttctggtaaaagcagtctctctctctctctctctctctctctctctatccccccctctccctctctctctacccctgaatctggcctttctaaacaccctcaacttgtgtacctgtatactatactgagctacactaaagtttctatatttagccaaatccagcccatcataccagctcttcccctggtatattcctaggagtggagctcggttcacgctgtttcacactttccttgggaaacactctgtgttcttctgcaaagaggagtaggcaatatgttttcagattcacagacaagcttctccttccaccgtcttgctcccaccctatgctaacctgttcacaaaggttaagcaagcagttggaattatggaatctcccatctggtttcctaatcatatttttaccatcagtatcaggcccatactcatgtttcatccccacactgctcctagccaggttcagaacctctctctagggtctcctcctctggtaacaaaagaatgggtttaccatgtttgtttctcattagcataagtggttataagatgcacctcatttgctataattgaagaaaagacaagtgtatttccactctcagagtccaaggcagtcccaagtgtgacttttaatatgtctcacactttctgggctctgagaagggcaggatgctagtgctcaaatgaccacaacaatgacaattataaacatctctgacatgagacatgatgtatacaactgattgtacctgtgtcctgggtttatttgcaatgcctgcaaatgaattcaccctgtagggagattattaaaactaccatggatatgtttgaactgttgtgagaattaccaaaatgtgaaacagagacatgaagtgaggacatgctgttggcaaaatggcacgggtagacttgttcaatgcaggttgccacaaaccttcaatttgtaaaaaatgcaatatctgcgaagcataataaaacaaggtgcaataaacgaggtatgcctgtatatccgactgattgatggtgctgttgagttcaactgtgtccttactaattttctgcctgctggatcccattcataactgaggcatgttgaagtctccaactacagtaatggattcatctatttctccttgcagttccatcagtttctgcctcacatatagtttttaaatgtatttttaaatgcacatttgactttttaaaatgtatatatttaaatgtatatattttaaatatatatatttaaggtacacaatttgatgatttaatatacatatacactgtggaataatcaccacaataatttgtctatcatctcagatagttaccattttctttctcccctttattcctttcttgctttttttcctttttttttggtgagaatgcttaagatacattatcttaccaaagttcaactatacaataaagtattgttaattatagtcacattgctattcatcagatctcaaaaaaatattgattatgcacaactaaaacttcgtacccctttgacaacttctccccacttcttcctccctccagctcctggttatcaccactctactatctgtttcaacgggtttgactatattagatcccacaaataagtgagatcatgcggcatttgtctttctgcatctggtttgttttacttagcacaatgtcctccaggttcattcttgttgtgtcacctgatagagctgttatttctatcttggtgaaagctgaataatagtctagtgtgtatgtatgtgggtgtgtgtttaccatattttttaaaatccatgcatccatcaatggacatttagtttgcttccacatcttggcgtttctgcataatgcttaaatgaacatgggcatgcaaatatctcttcaagatcctgttttcaattctcatcgatatatatcaagaagtaggactgctgaatcacatggtagttctatgtttaattttgtttggaacctctatgctgttttccagagccactacaccattttcattcccaccaacagtgcacaaggttcccatttccccatgtccttgccaacacttgttatcttctgttttgtttttgttttatgggaggtgtgtgtgtgtgtgtgtgtgtgtgtgtgtgtgtgtgtgtgtgtgaaatagtggtagtcctaatgtatgagatgatatctcatggtggttgtgattagcattttcctgatgattaataattttaagcatttttccaaataaatggccatttgtgtatcttctttggagaaatgtctgtttaatcctttgctcatttttaaaatttgattatttattattcagggggctgttattgagttaaaggagttttaaaatatattctagatattaacctcttatctaatatctctcttgcaaatattttctccaatttcataagttttttagtttgacgtcaccctatttctctatttctgcttttgttgcctgtgctttggtatcatatctaaaaagccatttcccttttcaatgtcatgattttttaattgctttcttctgggagttttatagatgtttataaaaaattaacttctttttgagttaatttttgtgtatggtataagggtccatactaacaacatttattgaagaaactaccctttccccaatgtacagttttgaaactcttattaaagatcattagaccttgtatatgagggcttatttctggactctatattctgttctatcagtctacgtatctgtttttatgtcagtgttatactgttttgattactgtgactttggaaatatgttttgaaatcaagaagtgtgatgcctctagctttattcttctttctcaagattgttttggctatttggagtcttttaagatttcacatgaactttagaatttttttcctatttctacaataaatgccatttggattttgatagggtttgcattaagttcgtacattatttcgggtagtgtaaatatttttaacaatattaagtctaccaatccttgaacacaagatatctttccaattgtttttctctcttaattttgttcagcaatgttttgtagttttcagtgtacaagtcattggttaagtttattcctaactattgtaaatgcgattttaaaaaaaatctatttggattgtccattgttactatataaatgcaactgacttttgagtgtttattttgttctattctgcaactttactgaatttgctagtctaataatttttgatggagtctttttatatacagttttctacatataagaccatgtcatctgcagagataattttactacttcttcttttccaattcagatgcattctatttattttccttgtctaattgctctggataagacttccagtactatgtagaataaaagtgctgagtttggacatccttgccttattgctgatcttagaaaaaaaaactttcagtttttcactatggcatatgatattagttatggcttttcatgtatgaaatttatgatgttgaggaaattctttctattcttattaatatattgttgaatgtttttatcatggaaaggttatttaattttgtcaaatacttttcctatgtctattatgatagtcatgatttttttcttcattctattaatatggtgtattacatttattgacttgtgtgtattgaactatctttgcaacccagtgataaatcccacttggttgtggcatataatccttttaatgtgctgttaaaatcggtttactagtattttggtaaggacttttgcatcaatactcaccagggatatgggttgtagtcttcttttcttgtagtatctttgtctggcattggtatcagggtaatgctggcctcatataatgaatttggaagttttctctgattctgtttttttggaagaagttgagaaggattcatattccctattctttaaatgtttggtaggattattcagtaaaaccatctggttctgggtttttctttgttgagaatttttttctttgttgggagattgtatgtttctaagaatttattcatttcttctaggttagccaatttaaataaaaatttctgtggcaccagttgtaatgtctcctctttcatttctcacttatttgaatgttctctacttttttcttttttaggctggccaaggatttgtccattttgtttatcttttcaaaaatccaattcttagttttattgacttcatgtttactatttttctattctctattttgtttatgtctgttctgattttatcatttttgctaactgtgggcttagtttttcttctttttctagttctttgaggtataaagttaggttattgatttgagctctttgtacttttttttttttttgggacagagtcttggtctgtcacccagactggggtgcagtggcgtgatctcagctcactgcaagctccgcctcccaggttcacaccattctcctgcctcagcctcctgagtagctaggactacaggcacctgccaccacgcccagctaactttttgtatttttagtagagacagggtttcgccatgttagccaggatggtctcgatctcctgacctcgtgatccacccacctcggcctcccaaagtgctgggattacaggcatgagccaccgcgcccggcctctttgtacttttttaaatgtagatgtttattactatgaatttccctcttggtactgcttttgctgtattccataagttttggtatgctgtgttttccttttcatttgtcttaaggtatattctaattgtatttattattcctccttgaagcaatggttgttcaagagaatgttatttaattttcacatctttaaaagttttctagttttgtttctgctgttggtttctagtttcattctactgtggtctgaaaagacacttgacataatttaaatcttcttaaatttgtcaaaatttgttttctaatctaacacgtaatcaatcttggagaaagatctgtttgctcttgagaagaatatgtattctgctgttgttgggtagaatgttctgtatatgtctgttaggtccatctggtaaacagtgttgctccagttagctctttctttattgattacctgtctggaaatcctattcatcattgaaagtgagcattgaagtggcctattacaggattgctatcaatttctcctttgaaatctgtcaatatctgctttatatatttatatatttatatttaagctgatgttgagtgcacatgtcttaacaattgtttattcctgttgaattgacccttttatcattatataatgacttcctttgtctctagggatagttttttattaaagtctattttgtctgatataagtatatccacccttactttcatttgattatcatttacatgaaatatatttttccgtccctttacttctagccaatttgaagtgagtctattttagacagcatattgatggatcttttttagataattgttcagccactctgtttttggttggagaatttaatgcatttacattcaagttaattactgaaaggtgagaacttattctgcctgtgttgtggttgttttattcttttccctctctttctgtcttccattgttatttgatgatttcctgtagtgatttgctttgactcatttctctttatcttttatatctattgtaggatatttcctttgtggttagctcccagcttgtgtaaaatatcttgtagttataaccacctattttaagttggtaacttcaactgcaaacgaaaactttactttgacttctcccataaccacccactttgagtacctgtagtcagggtttgcttctttttatattgtgtgtttattaacaaatttttatcttttactttcatattaaggttcaaagtaattcatgcatcaccttcacagttttacattattctgtatttatatatttacctttctcaataaggtttatgcttccttatgcttttgcattgctattcagtgctttttcatttaatttgtttttgtttgtttgtttgttttctgagacaaagtcttgctctgtcgcccaggctggactgcagtggtgcgatctcagctcactgcaaactctgtttcctgggttcaagtgattcttttgcctcagcctccagagtagctgagattacaggcacccaccatcatacccagctaacttttgtgttttttttagtagagatgaggtttcaccatgttggccaggctggtctcaaactcctaacctcaagtaatcctcccacctcagcctcccaaagtgctgggactgtaggtgtgagccactgtgcccaacctttcatttcaatttcaagaaccctctaaagatttcttataaggcaggctagtggtgacaaactcccccagtttttgtctaggaaatgttttatcagtactttatttttaaaggataattttgctaggtatagtaatcttagttggcaagttttttctcacactactttgattatgttgtcttactccctcctggcctgcaagttatctgctgagaaatccactgataattgtatgggggttcccttatatgtgatgagttgcttttctcttgctgctttcagaattccttccttaacctaggcttttaacaatttgattaaatgtatttcattggacagggtgatatggaggccagggtcttgggtctgtgttgaggagtctggctttgcatgagtagacaggtcacagattgccaagtacttgccaaatcccattttctgttcttcttgagaaaacagctagattacatttcccaatctcctttgcaaatatgtgggaccatatgactgtattatggtcaatggaatgtggattaaaataataaactttgcttctaggcctagccctttaaaagcttctgtgtgagcccccatgatacctttctttccctattgctggttgaatgtagaggaaccagtagagaagcccctgcgagatgacagagctacagatttaaggagctacattccttgaatcatggcagggatgactgcccactgaccaccctcagtgaaatgcattgtgaatgagaataacctttcatgggttaactgtattaccccatgaggtttgtaaaaatctgcttgaatatttgctccagcaattaaccaaactggttcatacatgggtctaactgggaaggcagaactgggcacctctgcccatgattgagtggaaacaactgttgggactgctgaggattgcaatgagagaaattaagtcatagggaggaagttaaaaaaaaatatgcagagccctcaggttgatgtagcagtttatttgacaaaagcttcagggtaaagaggtcaaggaaatagcagaaaggttaccagctagagccagtgggtgtcccaagaaggaagtaggcagcactcttcttagaccagatggtcatccttcagcccacagtagtgatcggccaatagaatctaggggtttagcattgatttaaggggctctctagaagagaaaagttagtcaaaagtcaagaatcctgggataaatccatttctaaaattaatagcatcctaggccccagatgaaaaaggacagcaattcttctgctaaatcagaagttacccacttttaagcaatttcccccaagaagtttgccaactgaacagacagatagataccaggtctccttgggcctggctgagagtagagcgcccatggagacgcccaactaaggggttagtaattggaactttggataaaggagggatgtatgaactgttgggtgatatgttgagggaagcaaagggaactgaataagagtgaagaaaaaagtagaggacctcatgttggtgtcttggtttattttgcagtgaggagcagcctaggtttggagataggaggacattgtcttttgctgcctatttctttaaccaggatttgggtggctgcggtcttttgaatagtcggtaaggaccagtgatgaagcatgcccaggccctagccttcccaccccaaccaactcactcgttgtctaagcagatgtttccacagtaggtccagcagcatgtatgatttggacgtacacaagtcattattttagtacaccttttctcacagtacttatatggaggctgtacccagcactgctcagtttctcttatcatatctagaactgagatggaagaagttagcagggtccgtctattcacaactcagacaagaaaccttttctaagcttaacaatcccttctgaaacttgagctccaagccacaaagtatttctctgccttccaagaaaatcccttcctcaaattataaccagtgtcttgtcacaagaccatccttgcatggcctgtgttcctccatctacatgtccctacagcatttcagactctaaagataggacctgggacaccctgaccatatatgacaccaaccaccaaatttattctcatgtaaccttagatttcagggcctgcaatatcctctaactccaatttccaaagccaatttgcagagtgggaaactgagccaagggagaatagaaacttactttttttccccttctcttttttttttttttgagacagagtcttgccctgtcgcccaggctggagtgcaacggcatgatctcagctcactgcaacctccacttcccgggttcaagcgattctcctgcctcagcctcctgagtagctgggattacaggagcacaccaccatgcctggctaattttttgtatcttaatagagacggggtttcaccatgttggttgggcagtctcgaacccctgacctcgtgatccgcccacctcagcctcccaaagtgctgggattacaggtgtgagacgccgtgcccagccatttttctccccttctatttgtttccctgatgatgccacctaagaagtcagtctctccataaattttatttccctggcccacaaccctcctgctcagtgtctttgttgtccacattttcttatcatatgaacccaaactttgacccactaaggagcctttatttgtcttttccatttttcatgttctaaaagactcttcccctccaactaaattaacgtgttaaatattacccttttggcattcatcaaaggctcacccaactgaggcacaaaggttctgaaaatatgggcttggagggaagctctgtgttggtttttcctctactggtctgatattggaaaatattatttcctgctagctgatggaatatagacaaaagatacgttcccttttcacatacctagtgttgctttcagagctgaaagagaaaacttaaaggaattgggaatatctaacctaatcttgcttgaatatctctacttaaggagagatcctttaaagcctgattcttgacatgcaggccctggatcagctacaatagacatcccaggactgggcagagcaccccgtcccttttcacaccacccacagggatctttgttccagaagcttcccagcacaggcagaagcatcacaactccagagatgaacatgacgagtagaagaatccagggcttcatggtgctctctgtgtgtatttgggttaagttctggcagaaggcaagtcttttcccaatactgctagacgtagaaaatggattgaggagaacagggtaagcaacaggggtaaagtgcttatgactatcatgttattctttccctttctagtacccagtagcataccaaccaactcccaggctagccagtgacttccccaggtttcttctcatctcatattacataccccttcctttgcaaaattatttcttattaaaatgaatttctcctgtctgattaaaaacaataaatcctcagattatataatatgtaaaattaaaaatacaaagaggaaataaacaagcattagcaattccaccatctagagataatcaatatatgtctatacttttatgttgtagtcattatttttatgaaattggacacatcaagtgtcctgatattttattttgaagcatatgaaacatgatgatgtaaagaagttttagtgaagatcctaagacaaaaggcactaaagcaatttaagagggaattacagatagataacaggacttgagaaaagatgatggccaagaactgttaggggactcaaaactttaatgcactaagatggtccaaagttggaggaattgtagagaagattttgaaggaaattttattggtaaaaagctttgctcgtgaaagccggaatgctgcctcctaattccaagttgagagaaaaggttttatgaatacgactcattgagcttgctatgtgatcctagaagtctatgggaacacagtagacttgaatcatgactgaagactttaaagggtgactttaaatctggccaaagcggcctgtagtagcagagaagagggctctaatttgtgaagtatctgaactgcaaatggccagacgacatttcatgtttccaatgaacccttgaaatctcccacgaaagagtcaagaccagaagcacagaaccagctcatgatagtatctattacacaagaactttcctactactcttattggtccgtcctccctctactccctaggagacagaaacttgctttagtccagagtgggtggaggaatagaattacaaagagccagagtgggggtggtgggaggcgggggagagagattcaccacatcctgttccataactggagcttctgagggagggaggaatccatagttctgaacaatttatgtagttgtgactaatttcatgggcctgcacattttacttattatattgagaagatgtttcatgactggagaatcacataaaatttgtggagacctacctaaattttcctgaagaagcaaggaaataaactaacaattctgaatgaaatatacaggggaggcaaaaatatgctcacatcatacaagtcatgacaagaattcagtcatacttattactatcatttcctcatatcatcaagacctgaatagtttcaatttcttctcgttataaaaatgtcctgatgaacctccttatagttaaagctttggtacatatattgttatttttatagcatgagttaatgaagaaagatttctaggcaaaagacattgtctttcccaggctttggataattgccgccacatttctctcactaagggttaggttacatttccacctaccggatatcaaatgcatgtccctccaccccttgttctactctaggctatacaaaggtaattttcatcaccacactatttgctgatgggtattttaagaggaaagaacatgggccccagagtcagataggcttgaattagaatcccaaccccaccaactcctagccgtggagcctgggccagccacataatccccagagcctggttttccccatccatattacagaaaaaaatatcaatactcatctcatctcatagggtcactgggaagattaaataatatgtatgaaacactaagcataggacctggaatatagtatatacttcataaatgttaactgtcagcattaagctcagaatatcctcctctggatatttgaaaactattttcaattacaatttttttctttttacttttttttttacacttagcattttaatctgtttagattctatgcctctgtgtgtggagggagacagggggagttcattcactcaataagtacttattaagtgcctaactatattccaagttctgggtattggaatatattccaagttctgggtattggaatatagtggtgaacaaaacagacaaaaatcctcccatttatacagctggcattctagttaaacaagataaggaaatgcatagatggtaatcagtggtaaggagaaaaataaggaaatggaagaaaataaaatagccttcagctgagtgacagctgaggggtaagggaaactagagtatgggaacagcagaaaaatcttaataaaaaggaatagatagacattttcttaacactgtaaaaatttaactattgcaatccaaaatccagcattccacattataaaactgaaagtactcccattaaaattagaaataggaaaaaaagatatgcactattaagactactttttaacattattttcaagtgtttaagccactataattagaaaagagaaaaatttgaactataaataatagaagagtggaagaggaacctaattacaatggaaacttcccagccttctcccatctacccccctcattctctattgctctacttttctagaaccaaataggaaggaaaataagagtcaaagaaaaggataaaattctgacatgaattgcatcattgcatgaacaaggcagtgattttccctctgcctgaaagtctttatatttgttcagaaattttcaatgaagcaaaagagatttctttgtgctgtccaatgtggtagccactagccacttatgactgttcaaactcattaaattaaatcaaaattcagtttccagtcatttcaagtattcaatggtcacatgtagttagtggctattgtccccaaagtctttctctgatgcttctcattccatttatacataggacgatgggaatagtctacatcaacctttgacttcttgtgtgtcctatttaacattccttatttctcaggcgcggagcctttccatcatcacagaaagttctactgaacaatgctgctctagatgaatccaccaaaatgactctgctcaaaagcagaggtaatactagaaaaattttaaagctgccaaatttttcagaggagactttgaaaatgtattctcctcttagcttctgtgaaatttggaaggtgaaaaatacaagttttaggcacatgtcattagatgtattgacttttagacaaatcacttttaagagattcgagcagaggcaaaagcagcaacatcttagcttggcaacttcatcaagtcatgcttaggtaagctggcagagacacaggttcttaatggagaagcttggagagcaggaataagcatctaagagtagaacccccacacacacaaatatctgatctgatctacaatttaagggcttctcttctcctttcgtttctctccctaatctcctgctcttgctagctagcaatggcaagatactcattccttgagcctgagtccttgagaacctcagagtgttcttctgattatgtgaatataccagcacatggcaagacaggtgaaccatgaagatactctgttatctgcttacagccagggatgtgagggatgaggtaagtgggtgaaagtgggcatagattgcagtaggcctctggattcctggtaccaaccctttgcataaagaaggaggaatactgatatacagtgacaggaacaccataaatccaaagcattggattccatgaggctgtttctttgtattccaaaataccaccctagacccaagttttccagagctttgaaatctgttcattcacacggcctcattcttactctagttttctttctttctttctttccccttgccctttaaaggtgttcaggaatctgaggatgcctagtctcctgttttgcacaccctcaagtgtactaaatgatcccagacaaaagaaacatcattatgcccaggctgggtacttctcaacttctcatatacagagtgctgtgaattttttggtcatcctgagacaaactgcaggacaattcaaagatcccccaggatcagaaagacacagaactactgctctccaccaatctggctttccagataatgttaaagaggacagagtgctggatttagtgtcaggaatgctgaaatctttagtttctgtcccttttacctatggaacctcagacagctcatgtcaccccctctcaattttcttatttgaacaaaagaaacaataatccctacctcacaggaatagtgacaccatctgggctaggaattaatccaagcaagccacaaatagaagctcatgtctcaagacctttatccccacctacctctgaaggtgtctgcattgagtgtctgtagtaactggctgacagctcttttgtctggccttttattatgaagttgtttgaagtggggctcgaactgggggcagaagagcagaaaaacaatgttcaaaggccaggaacttaatggtgattttggttgtgaccgatttttaatttctacccagaaactacatgttggctgtatcacagattctttcctttgatattcacccatccagatgtactcaattttctaaggtgcaggtgggatcctctgaaaagctgggaagaacattgtgtacctggattgcagctcaggccacccccagcagacccaaagtacatgttcccaaagtctctcaaatacatctcagtccattcatatgtaggaagttgggaacagtctacattgacctttgacctcttgtctgtcctatttaacattctatctttctcagtattgattctcttttaccaataaaatcataacaagatctcccaccaaatgccctctgacttttatgtagctaaaaagagactgaataggaagaattttagaaaaagtagatgaccacctaacaaatgaaggaagcgacgtgaccaaatccagcaccaagttcttgccatgagcttgttggttgaggtgcagagggatttgttcaccaaatgtcagggaagggcattatattgggcacacaatacacatgatttggagatcactagctcatgagaaaagagaacagtcaagtgggcaggaggcagggacttccaaggggtaaaccttctctcaaagcctgtctgcaggaatattatacgcagtgacaggagatgtcaatataaaattcttcctaggatacaggcatacctcggagatattgcaggttcagtttcaggctaccataaaaaaggtaatattgcaataaagtgagccaagtgcacttttttggtttcccagtgcatatgaaaagtatgttttcctgaagtcttttatttatatatttatttaaactagaaaatgaaatatttaatagttgaaagttgtttctctgaaaaagctagtaaaatttgcaaacttctgatacaaatctgtatatgtttcagtatacaactgtacctctttcatattctaaacagtttctaatagttttcttatgatgaatttcattattacttattaaaatattaaaaaggtatgtttacactatgctgtagtctgtcaagtgttcaatagcattatgtataaaaaataatgtgcataccataattttaaaatactttactactaaaaattgctaatgattatctgagccttcaacaagtcatcatctttttgctggtggagggtcttccctcaatgttgatggttgttgactgatcagggtggtggttgctgagggttggggtagctgtggcaatttattaaaataagaacaatgatgtttgccacatcaattgattgatcctttcaagaaagatttctccatagcatgcaacgctgcttgatagcattttatacacaatagaatttctttcaaaatttcggtcaatcctctcaaactgtgctgctggtttatctaagtttatgcaatattctgaatcctttgtcatcattccaacaatgttcacagcatcttcaccaggagcagattccattcaaagaaaccactttctttgctcatctataagaagcaactcctcatccactcaagttttctcatgagattgcagcaattcagtcagatcttcaggctgcacttctaattctcactgttgctattttcatcacatttgcagtgacttcctccactgaagtcttgaaaccctcagtcatttataaggattggaatcaacttcttccagactcctgttaatactgccatgttgacctccttccatgaatcatggtatgtagaatagtgaatcctttccaggaattttttaatttactttgcccagatccatcagggaaattactatctatggtagctatagccttccaaaatgtatgttttaaataattttgacttgaaagtcaaaattatctcttggtccatgggctgaagaatgaatgttgttagcaggcatgaaaacattgatctcttcatatagctccatcagagctcttgagtgaccaaaatctttttttctgagccgtaggcctcaacagtgggcttaaaatattcagtataccatgctgtcacacagtctttgctgtttcatttatagagcagagcaagagcagagttagcatagtttgtaagggctctaagatttttgaaatgataaatgagctttggctcattattactttaagtcaccagctgcattggcccctagcaagaaagtcagtctgtcttttgaagttttgaagccaggcattgacttctatctatgaaagttctagatggcatcttcttccaatataaggctgttgtgtcttcattgaaaatctgatgtctattgtagccaccttcatcaattacagttgacccttgaacaaaatgggagttaggggtactgaactcctgcacagttaaaaatctatgtataggccaagtgcagtggctcacgcctgtaatcccagcactttgggaggccaaagcaggcagatcacaaggtcagaatttcgagaccagcctggccaatatggtgaaaccccatctctactaaaaatacaaaaattagcctggcatggtggcaggcaccagtaggcccagctactcagaaggctgaggcaggagaatcacttggacccaggtggcagaggttgcagtgagcacagattgtgccactgcactctagcctgggtgacagagcgagactccatctcaaaaaaaatttaaaaagaaaatccatgtataacttttgacttctcaaaaacccaactactaatagcccactgttttatttttaattttagagacagggtcttgctatgttccctaggcttgtctcaaactccccgctccaagcgatcctccttcctcatcctcccgagtagctaggactacagacacacaccaccatgcctgaaatattctttttattgagatggggtctcactatgttccccaggctggtctcaaactactggctcaaacaatcttcccccactcaacctcctgagtagctgaaagtataggtgtgcaccatcatgcctgactaatagcctactgttgaccagaagccttactaataacataaacatttgattaacacatattttgtatgctatatgtattttgtgtaccatttactcttaccagaaagtaagctagagaaaaaatgttattaagaaaatcataaggaagaaaaacatatttactatttattaaatggaagtggatcatcataaagttccttgaggatgtataatgaacccgcacagttcaaatctgtgttgttaaagggccaacagtatcttagctagatcttctggataacttgctgtgtagcttctccatcagcacttgctacttcacattgcccttttgtgttttagagagggcttctttccttaaccctcatgaaccaacctctgctagcttcaaacttttctgctgcagcttcctcacctctctcagccttcataaaattgaagagttggggtctttctctggatgaggttttggcttaagggaatgttgtggctggtttgatcttctgtctagatcactaaaaccttctccatatcagcaatagagctgttttgctttcttatcgttcctgtgttcccggagtagaacttttaatttccatcaataacttttcctttgcattcacaacttggctgtttggtacaagaggcctagctttcagcctatctcagctgttaacatgccttcctcactaagattaattatttttctagttttttatttaaagtgagaaatgtgggactcttcctttcacttgaacatttagagtctgttgcggggttattaattggcccaatttcaatattgttgtgtctcagggaataaaggggctgagaagagggagcaagactggcaaatgaccagtcagagcacacacacatttattgttcgccatgtcctatgggcacagctggtggcactccaaagcaattacaatagtaacaacaaaaatcattgatcatagatcaccttacagatataatgataagaataataataataaagtttgaaacattttgagaattactaaaatgtgacacaaagacataagtgagaacatgctgttggaaaaatagtgccaaaagatttgctcaatgcagggttgctgcaaaccttcaatttgtaaaacatgcaacatccataaagcaaaaattaattaataaagcaaagtgtaataaaatgagatatgcctgtatgttgagtgcactgaggggcaggaagtatatgtctggactccagggacttggctgaggaaggtggaccagtacagatacaaagagctttggaaccaaggtaaaaaggtgtgggaacaaactgaaggaaattttgacagggactgaaaatggtgccaaacctagagtgattgaattatggatttctaagatatttatttatatggcagcaaaatgatgttccatgcatgacgatcatagtcttttgctctgtgtggcccagctgctggagagctgaggagcacagtcactaatgagtagcccaggagtgccaaggactcctgccactcatgattctggatcaagctatgcagaatttaggacaatctgtatactcttctattttagttaagaatttcccagtgcagtatctgaaatactgtatccaataattctatatctagcaaagctatcctttcctgatgaaggtaaaataaagacattcccagaaaaacaaagactgagagaatttgttgctaccaggtctgcctttcaagaaatactagagaaaagctttaaagctaaaaagaaaagacatcaggtagtaatgagatctacattaagaaacaaagagaacagataaaagtaattatgtaggtaaatataaaatctgatattaataatttttaacagattggaatgacaactgtataaaacaatgattataatcattcaattgtattgataggcttaaaacataaagatgtaacatgcatgaaaaatagcacagctgggcgtggtggctcatgcctgtaatcccagcactttgggaggctgaagcgggtggattaccagaggtcaggagtttgagaacagcctgaccaacatggtgaaacctcgtctctaccaaaaatacgaaaaattagccagccgtggtggtgggtgcctataatcccagctactcaggaggctgaggcaggagaattacttgaacccaggaggcggaggttgcagtgagtcgagatcatgccattgcactatagcctgggtcacagagcgagactctgtctcaacaaaaaagaaaaggaaagaaaaatagcacaaaagagggaggaaggcaggcatgtaagtatagttatgatcatccagtttaaatactttgtaagtatttttaagtatgagagccatggattattaagtagcgttatttgtttttcagacatatgggatttgcttttggtattgattttctattttcctgcattttcaaaagaaaatattgtatggcattagtcatttggaattttttaggctttctttgtaatctaagtcattgtaactaagtactcaaacctgctcaattgggccgggtgtgatggctcacaccagcacttttggaggcagaggtgggtggattgcttgaggccaggagttcaagaccagcctggccaacatggagaaaccccgtctccactaaaattacaaaaattagctgggtgcggtggcacacacctgtaatcccagctattcgggaggctgaggcatgagaatcacttgaacccaggaggcagagattgcagtgagccaagagagcaccgctgtactccagcctgggtgatagagtgatactctgtctcaaacaaaaaaaactgctcaatctacaactttgtatagataatttattttcatttattgaggccattttgtgtgtatgtgtgtgtgtacacatatatacaattgttaaggtttcttgatctgtttttctttaccagtataaaatattcttgtctaaattgtgtcatgtcctctatgttgaatgttaattatattatgatatttaaattgttatatcatctttctttttaattcatatttggtggggcatccttttttattcctttattttaaattacttgtttacttttgggaaattacacattgttgaatcatttaaaaattttaatctgagaatctctgtcttttaataaatgtctctaacccatttacctttaataaatattcttatagaaaacaatcttatgttagggcctatctctggcatcttatttcatatttttaatttatcatgctttttaaatatttgtttttatttctctcttcagacatctattggatgaatgaaatatcttctactattttaaaagccattattgtattctgatcccttagaggattttttatttaagcccacattacttttccacatagacttaaagatttctaaaacttctaagttttcctaaaacaagacagctctttcagtatgctaactgttccctttagtttaccttctgaccttgatattttctagacagtttttagttcatgattataatagatattggtgttctcttattctatctcttccttccactttcttcttaatccctaaatttttagacaacaccaaactttatgaattgacttctcactatgcaaaattgttgacatggcaggcctgcagttgctatctttaaaagtcctgcttacaaggttggctcttggttggcatccataagcctgaattttgagaaagttcccattgttctcagaacaaacaagtatggctcactgtgcctcaaccatttgtacaaacaacttggtttatggtagatatctgcttttattttgggagtctggaattttggtacatgctaggcagaagctgctatatgaccagcccccaatagaaaccttggacactgtgtttgtctctcatgagcttccctggtagacaacacttcacacatgttgtcacaactgatcgatgggggaattcagcatgccctgtgtggctccactggtcattgggaaaagacacttggaagcatgcacctgatttcttctggactttgccccttgcaccttttccctttgttgactttgctttgtagtctttcactgtaataaatcatagctgcaagaaaaaccatgtgctgagtcctgtgagtcctcctagtaaagcactgaacctggggatagcgttgggaatccccagcatattcacttatattgcccatatacttttgtatagtggttctagatttattttcctagtggagcacatccttcaagcaggctttcaaaaagggtctttgtgtggtaagcattctgatgtttcatatgtcttagaacaattttattgtgccctcatagttcaggatgtaaattttcacttgaaaagtttttaccttaaacatcttgaaaatgctactctattgatttcttgtcctattgtcactatttgaaagtctaatctcagtctgattattcttcttctttgggtgatctaatctttctctatagaatattttaaaatttatttgtatttgatgttcctacattttataatgtggctagatatgcaagttttctttctctattcttttatgatcatttccagtctgagatctttaatagttctttcatttggggcaacttcaatgcattgtttcattaaatattttttaacctgctaaatctttttcttttagaactactatttggatgtttacacttatacctctcgcttccacataccttaatcttcctttttattttgaaacaatcttaaagtagcagaaaaactgaaagtacagtaaaaataacttcttttccctgaaacatttgagagtcagttacttaatggtgcccaatcacccccaatgctgtcatgtacattttctctaaagaaagacaagttcttctacataaacacaacatagccatcaaaatctggaaataaatgatgccaatatctactctaatctatttacatatattaattatgtctattttatgcatgattttaattaattctgtattatttgctatcagtcattcagtgtgagtgcagaaacatttcatgtaaatgtgatgttcactgctaggtttgatttgaaggccaaaaggaagcataggtttgttattctcatcccattaaccagctcaacttgatgggggaggtgatgcaaacctaaacagatttgtattgtcaaacctaaaacagtttaggttaagttaagctaagtgtgcatgtttgagaaatggctcaggagtgagggggaaactaatggatgggaccagctgataatctagctatgaagatctgggtaaaacacccagagagaaattcagaggagcccaagctgacacatttcattataatggtcatacagttattcaccaagaaaaacaaaattaggccaggaaaatagcaaacagatggaagcttcaaggatttggggattgttacaaagatcccaaaattaatctggatgttgttgcatctttatttcagatggcacatcaagcaactcctcttattcttttctgtttgtgcagaaaaaccagatctgtggtgtaggttttggatgtttttaggccaggcgtggtggctcatgcctgtaatcctaacactttgggaggccgaggcaggtggaccacctgaggtcaggagtggccaacatggtaaaaatccgtctctactgaaaatacaaaagttagccaggtgtggtggcgggcacctgtaatcccagctactcaggaggttgaggcaggagaatcactttaactcagggggcggaggttgcagtgagccgagatcatgccacttcactccagcctgggcaacaagagagaaactccatctcaaaaaaaaaaaagtttttaaattgacaagtagtaattttacatatttatgtgatacatagtgatgtttcaatatgtataatgtatagtgatcagatcagggtaattagcatacccgtcatctcaaacatttatcatttctttgtgttgggaacattcaatatcttccttctagctatttgaaattatattattcttatgtatgttcatcctacagtgctatagaacactagaacttattcctcctgtctagctatgacgttgtatcctttaacaaatctctcccactgggcacagtggctcacgcctgttatcccagcacattgggaggctgaggcaggtggatcacaaggtcaggagttcaagaccagcctggccagcatggtgaaacacccgtctctactaaaaatacaaaaattagccaggcatggtggcacgtgcctgtagtcccagctactcaggaggctgaggcaggagaatggcttgaacctgggaggcggaagttgcagtgagtcgagatcgtcccaccgcactccagcctaggcgacagagcaagactctgtctcaaaaaacaaaaaaatctctccctatcttccccttcccactatgcttcctagcttctagtacctgctgttctactttttacttccatgaggtcgacttttctccagatatgagtgagactatgtgttgtttaattttctgttcctggctatttcacagaacataatgtcctccagtttcagccatggtgccatgaaccacgggattttattcctttttgtggctgaataggattgtgttgtatatttgtatcatagtttctttctccattcctcggttgttagacacctaggttgagtctgtatctcggctattgtgaatagtgctgcaataaacatgggggtacatatgttgatatgctgatttcctttcctttggataaatacctagtagtgggattgctgggtcatatggtagtggagttctatgtgtaggcttttgagaaattgcaataccattctccatagtgactgtactaatttatattcccaccaacagtgtataacagttccccttcctccacaaggtcaacagcacttgttattttttgtcattttgttgttattgtagcgatcctgactggagtgaggtgatacctcattatagttctcacttgcatttccccgatgattagtgatgttgagagaacaatgaagtcatttttttcatatatttgttggtcatttgtatgtcttcttttgtgaattgtctgttcagatcatttgcccattttttaaattggattgtttgtgtttttgctgttgagatgtttgagtttcttgtatattctggatattaatcccctgtcaaatgaataatgtattagtctgttctcagattgctatgaagatactacctgagactgggtaatttataaacaaaagaggtttaatttactcacagttccacatggctggggaggcctcaggagactttaaatcatgtcagaaggcgaaggggaagcaaggcacgtcctacatggtggcaggagagagagctcatgcaggggaaactgcaccttttaaacaatcatatctcatgacaactccctcgctatcataagaacagcatgggggaaactgcccttacgatccaatcacctcctgccaggtccctcactccacacatggggattagagttcaagatgagatttgggtggagacacagagccaaaccacatcaaatactttgaaaatattttctctcattctgtagattgtcttttcaatgtgtcgattgtttcctttgctgtgcagcagctttttagtttgatataatccaatttacctatttttgcttttgttgcccatggttgtgagatcttatattaaaaatctttttgtaagatcatgaaaatgtcctgaagtatttcccctgtgttttcttctagtagttttacagtttcaggttttacctttagatctttaatccatttttagctgatttttgtatagggtgagaggcgaaggtctaatttcattattctgcatatggatatccagttttcctagcaccatttactgaagagactatcctttccccagtgaatgttcttggcatctttgtcaaaaagcagttggctatcgacgcatggatttatttctaggttctctattcttttttttttttttttttttttttttgagacagagtcttgctcttgttgcccaggctggagtgcagtggcacaatcttggctcactgcaacctctgcctcccaggttcaagtgattctcctgcctcagcctccagagtagagtagctgggactacaggtatgcaccaccatgttcgtctaatttttgtacttttagtagagatggggttttgctatgttggccaggctgatctcgaacacctgacctcatgtgatccacctgcctcggtctcccaaagtgctgggattataggcatgagccactgcacctggccctaagttctctattctattccattagtctacgtgtctgtttttatgccagtgctatgctattttggttactagagcttggtagtatatttagaagtcttgaaacctgttccctccagctttgttctttttgttaaggattgctttggctattctaggatgtttgtggttccatacatattttaggatttattttatattactgtgaagaatgtcactggtattttaatagggattgcattgactctgtagatggtttagggtagtatggtaattttaacaatattaactccttccatccatgagcatgggaagtttttccatttgtttgtatcctcttcaatttcttttatcagtgttttgtagttttcaatgtagaagtcttttatctccttggttaaatttattcctaggtatttatttgtagctgttataaatgggattgccctcttggtctctttttttaactagttcattgtgcatagaaacaccactgacttgtatgtttattttgtatcctgtaactttactgaatttctttatgagttctacaggtttcttggtagagtctaagtttttctctacataagagcttgtctgcaaacagggtaaatgtgacttcctcttttccaattttgatgtcctttattgttttctctttcatgattgatctaactaggacttccagtactacgttgaataagagtgggtaaagtgagcagcatgctcatggaggggcatggaggctccctagcctttcctctatatcttgtttcagttcttagaggaaaagttttcagcttttcaccgttaagtatattgttagctgtgggtttgtcatatatgatctttattatgtggaggtgctttcctttcatacataatttattgaaagtttttatcataaagtggtgttgaattttatcaaatgctttttctgtatctactgagattaccgtatggttttgtccctgattctgttgatgtgaagtatcacatttattgatttgtgtacattgagccattcttgcattcgtatgataaatcccacttgatcatgccacattatctttttgatgtgttgttgaattgggtttgttagtattttgttgaggatttttgcacctattttcatcaggaatattggcctgtgggtttctttatgctgtcttgttattgtctggttttggtattaaggttatgtgggcctcataaaattgagctaagaagaattcctgccgcatcaattttttggaatagtttgagaagaattggtattaatttatatttaaagggtcatagaatttggtggtaaagccatatggttctggacttttgtttcaggggagactttttattactgattcaatctccttacttgttattcgtctgttcaggttcttctgtttctttttggttcagtgtggtaggttgtatgtgttcaagaatttatccatttcctctaggtttttgaattataaaggatatcacaaaggatacagaggaagaggtgcataaggtgagatatggggaaaggctagagagcttccatgccctccatgagcatgctgctctccaacaacctctaagtgttcagtggtagccacctggaagctctgacttatatattttaatttgaaatttctgttcagttttgagtaattgtctttttttagactaatttctaattatttccattatagtctgaaactatgtcctttgtgatgtaattctttaaaattttgttcagactttttttatagcctaatgtatagtcactttttgtacatgttttatttgtgcttgagaaaaatgtgttcctctagtttttctatgcagacttctgtatattttaattaagtcaagcttattaatcataatgttcaaattacccatctctttactaaatttactactctatcaataatttgaatgtataaagtatagaccttctatatacccataaatctttccccttataaatgtcagtacttgagcctgccacaatgttgactagactgctttaacagaaagcctccatcacataataactgaaatacaatatactttttatttcttgctcaaataataattcaaaatgagtattctaaaacaatgggtatccttttttcatgtgataaaagaagtcaaggacccaggctcctttcaccttttggcttcactaggctctagaaccttgttgtcatctatactgagctggtggaaaagaaaaagagtgtgaaagagacttgccatcttcttagggtcttgacctagtagtgacaagtctgttagccaaaatatttacattgtggcactggctgcaagatgcttgggtaaggaaaatgcagcttctatttgagatgatgattctcctctatataacccctctttgctaggatagttatgacagtgtccagtctctaaattgttcatttatgagtggacaaaaagaaaaactaggaaagagagagcctttgggaagggtcaaataccactctgtaaactataggtacaaatatcagaatttttgaattataaaggatatcgcaaaggatacagaggaaggtgcataaggtgagatatgggggaaaggctagagagcttcctttgaatgtaaattacaactgtggactgaaggagtctgcattaggagttcagaatgtcagaaagaggttcaaatctttagaagattatcatcatcagaggaagagggtgatcttcttcccagcttgcatgcctactgggagtccagtgaccctaggttgtcccctctttctcctgttagggaagaagaaacatcttcacttctgagagttcatttccttcatgatattcaaggtcagtgaccacctcctcctggacagcctgccaagcctttgactgataggtctctccccctgtctgagctctaagatatttactatgtttctccactagcccttctgtcccatgccctacaatagtctctctttctgtgtgtttatgtgtgtttaaatttgtatatgtatatctgtgtatgtgtttatatacatttatatatgaaacagctacttactctttcactcaggaattctagctctcttagtctaaagaaatcaaagatttataaataaaaataatatgacattctctagattattagtaattagtacaatacaaatacttgattattagcatttgagagctgtgcaattatgaaaatccacattttgagaaatacttacatgattaaataagggtggcaaaaatagataacaaaagttgtttatattaaaaggattgtttatattaaatatggagagaaactaaaagataatgcaatgaaacatcagttaattctaagcaactctttttaacaatatattttttcttttcttttttccataaaacattttgtaattagaaagcagaaataaatgatatctttcattctatcggcaagaacacaagactggttatgtgaaaggaggaggcgtcattcctgcggaagccctatcccacatgacgaacgacaaggccaggggcaagcaaaaagaggaaggactctcttgctctgctccgacttggccagtagaggcagtgaggagctaaagatcattccttctttccttccttcactctccgtagacagctctgcagggaagtctgtgacaacctggccagacatagggctcacgatctgatcagagtcatggcaccccagactctgctgcctgtcctggttctctgtgtgctgctgctgcaggcccagggaggataccgtgacaagaagaggatgcagagtaggtgatgggctgctggatgggtgagggggaattgggtagggggaatggagggcctgtgtccagtctgagtaggacctaggagttggaaactctctgcatatccagctctgaccacaatgttgtgtagactctggactgtccctaaaccatggccctccagccccttagctggccctgggaatagtaatgggaatgaagaagaaacctgcatattttgctgttccttctcaatacttagagagaaatggcacatcccatagtgaaaggcgcaccagggctgagaatccagtggggaaagcaagacaattattatttgatttatgcacatttgtgaggagtaaagattcagaagtggttatgacggtaggtgtaggtgtagaatgggtataagtgtagggaaataggacataagacaagcaaaagttggggtacacagagccaagttaaggttatcatcaaaggggcaaggagagtggtggtggaaagggaactaaagaaggggcaggaagactagagacagtgacagtgagcagaagagagggagagacaagaggcatgttgatcctcatctctgaattctactattcagagactaggagagagtttgaaagatgtctcatgcttctttgagctctcaggatcagactgtagattctttggtggtgacttcaccaaggccatgactagtaagggagatggagttctgattgctggtgtgtggagaaggtccaggaagcccaggcattgtggtctaatggggtaaggtgtacagtggagagacaggatttaaaatatgaccaatcactaggatttggtgatgggcaggaaggtagttctatgaagaaggaatccaggagtatcatgactgagacctgggttcaagggtcttggaggaggcttcagcttgagaaaaatgttctctaggaaactgcgtttatttaccgttctattctccttgtcagaaacacagctatccccagaaatcaaagtctgccagcagcagcctaaactatatctatgcaaacacttatgtgaatctcaccgagattgtcaagcaaataacatatgctgttctacctactgtgggaatgtttgcatgagcatcctgtgagtgggagagtgggctgggatgtgcatcctgcttcccaactcctctatccaagactgtgcccacatccgaagcacaaggacctcaagtcaccagcataagaacatcaacaggaatgccgccctctctactgtctgaaccccttgtccctgtcaaataaaccagaacaaatgcccagggatcctacctcttttgctgccactacagatgatcattgagagctcactgtggcccctacagatgccccacttgtcttgcgtcctggtgttcaatttctctccctggctatgcttctctaccctccctctccctctttggcccacgtatccctgccagccctcaggatgcccagccccttgctgttttgctcactgaaccagtactcccagggggaggaactgctcatgtgcagcatctcctgatgctaaggagaacatttctcaccctggagtcagaaggacccattaagcatgagatgggtggcagttagaacccgagataaagagtgggaggcccccaagcactgctttggtctccttagccttggtgcaccgccatcctatgctccccaatctctctgtaaggttcagattactgtctatcattaggataatgagtcccaggaagtccagcaagcccaaggccacaagagagtgagaggatatgatgtgactggaagagggtgtttcctctaggatcactttttcctcacttctctccattacctgagaccagaggcatcctagtgagagtgagtgcctgcaccaaccccaaagctcctcctatccagcacccaccaatatggctactcctctgatgggacccattttgggcctcaggatctgacactccagcaccttccattaactgaatagtccttatctttcccaagccctcttccttaggggctggttcattctcttttctttagatcaagaggaacactaagggatgtggaacaggtggttcatgctgctgttgctaaggagtaattggcacagagtggctatgggtcttccctgtcatcctactgtgagttggtggaaattaatcagtgtggtacagaatctcccactctgcaatcgcaactcctctgaaatgatcctggggctagatccagggttgggtcacatgtagctaactgggacatgaagccaaatgtgaagaggtttcaggaggataggccatgcccagaggcaggtgtgcagtgttatgctccagtctagtgcttcttgctgggccattcaatgaaagagacatcagagaagaaaacttccttcatcagaccagaggctgtgagccacctctgaggcatcaccgggctctgggtatctcaggcttgtcttcacctttctcaagagcttcccttggacaaggaggtcttaggaaagagatcatgatcaaccatcaacacagacaccatcagatgtactctgtgggctgtaagggcatgatctccaagagaccttatttggtgtttccttggatagcctcccttaccaagcatcctctcaagccacccccaaacatgcctactagacactacaggcatatcttgttttattgagccttgctctattgcacttcacagctatagcgtttcatacaaattgaaggtttgtggcaactctgcatcgagcaagtcatctggcaccatttttctaacagcatgtgcttacttcatgtctctgtgtcacattttggtaattctcaaaatatttcaaacttgctaggcgcagtggctcatgcctgcaatctcagcactcgggaggccaaggcaggtgaatcacctgaggtcaggagttcgagaccagcctgaccaacatggtgaaactccgtctttaataaaaatacaaaattagctgagtgtggtggcgcatgcctgtaatcccagttacttgggagactgaggcaagagaatcgcttgaacctgggaggtgaaggttgcagtgagctgagatcttgccatagcactgcagcctgggcaacaagagcgaaactccatctcaaaaaaaaaatttcaaacttgttttattatcatatctgttgtgatgatctgtcatccataatcttggttattactgttgtaattgttttgggacactatgaactgcgcccctaaaaaatgattaatggataaatgttgtgtgtgtgttctgactgctccaacaactggccatttccccatctctctccctctcctcaggcctctctatttcctgagacataacaatattaaaattaggccaattaataactccacaatggtctctacgtgttcaagtgataggaagggttctatgtctctcactttaaatgaaaagctggaaatgattacagttaggaaggcatgtcaacagcaaagatatgccaaaagctaggcctcttgtgccagttagccaagatatgaatgcaaaggaaaagttgttgagggaaattaaaagtgctactctagtgaacacatggatgataagaaagcaaaacaaccttattgctgatatggagaaaattttagtggtctgggcagaagatcaaactagccaccacattcccttaagccaaaaacctaaccagagaaaggctctagctccctccaatattatgaaggctgaaagaggtgagaaagctgcagaagaaaagttggaagttagcagaaattatttcatgaggtttaaagaaagaagccatctccgtaatataaaagtgcaaagtgaagcagcaagtgctaaggtagaagttgcagcaagttacccagaagatcttgcaaagtgatgaagatgtctaaattaaacaatagatcttcagtgtggaaaaataagccttctgtaggaagaagatgccatctaagactttcataactagagagcaaaagtcaatgcctggcttcgaaacttgaaaggataggctgactctcttgttaggggctaatgcagctggtgactttaagttaaaggtaatgatgatcatttaccattctgaaaattccaagtcccttcagaattctgctaaatctactatgcctataaataagacaccatcttgatgatagcacatctatttacagcatggttcactgaatattttgagtctacttttcacacctagacacattttgagtctacttttgacacctagacacctactgctcaaataaaaaatactcattcaaaatactactcccattgacaacgtgcctggtcacccaagagctccaatggagatgtacaaggagattaatattgttttcatgcctgctaacacaatatacattctacagcccatggctcaagaagtgatcttgactttcaagtctcattgtttaagaaatacatcttataaggctataggtgacatagatagtgattcttctgatggatctgggcaaaataaattgaaaaccttctggaaatgattcaccattctagatgccattaagaacattcatgatcgacaggaggaggtgaaaatatcatcactaacaggagtttggaagaaattgattccaactctcatggctgactttgagagtttcaagacttcatagaggagcccactgcagatgtgatagaaatagcaagagaactagagttagaagttgagcctgaaaatgtgattgaattgctggaatctcatgataaaacttgaatggatgaagggttacttcttttttttttaagagataggatcttactcagttgcccaggctggagtacagtggcatgatcagagctcactgcagtcttgaactccttggcttgagctatgctcccacctcagcttccctggtagctagaactacaggcatgcactactgcccttggctttttttttttttttttttttttttttttttttttttggaaagacaaggtctagctaagttccccaggctgatctcaagttcctggcctcaagtgatcccctcctacctcggcctcccgaagtgctgagattattataggcataagccatggcacccagtcaaggagttgcttcttatggatgagcaatgaaagtggcttcttgaattagaaacttctcctggtaaggatgctgaaaacatttttgctacttgggaggctggggcaggaggatcacttgaacccaggagtttgaggctgcagtgagctatgatccttgccactgcactctagcctgggtgttaagacaagaccctgtctcttaaaaaaaaaaaatagcaactcttcatccatgaaagttgtatcattagactgttgaaatgacaacaaaggatttaaaatgttacataaacttatgataaagcagtagcgggatttgagaagattgactccaattttcaaggaaattcttccgtggaaagaaattcaaacaacatcacatgctacagagaaatctttcatgaaagaaatagtcaactgatgcagcaaactttattgttgtcttattttaagaaatttccatagccactttagtaaccaccaccctggtcagtcagcagccatcaacattgaggcaagactctctaccagcaaaacaattatgactaactgaaggtcagatgatcactagcatttttagcagtaaaatacttttaattatatacactgtttttaacatataatactattgcacacttaatagattatggtgtagtgtaaacataacttttatatgcagcaggaaaccaaaaatatgtgtgattctctttattgtggcagttggatccaaacttgatctctaacgtatatctgcattaagagaggcaaagttagccaggcacagtggctcatgcctgtaattccagcattttgggaggccgaggcaggtggatcacctgaggtcaggagtttgagaccagcctggccaatgtggtgaaacctcatctctactaaaaatataaaaattagccaggtgtggtggcgcacacctgtagtcccagctactcaggaggctgaggcaggagaatcgcttgaacctgggaggcagaggttgcagtgagccgagattgcaccactgcactccagcctgggtgacagagggagactccatctcaaaataaacaaacaaacagaaaaacaatgagaagcaaagttacctgccagtggccacatggagagtaaacttccatgtccaaatccagagcactttgccatgtaaacacactatgggttccaaactgctctatttcctgtcactggtgcaagtgccatgaactatgaattttactagaagcagttgctccaatcactgatgtcctgacctatgttccagagagctctctggacagcctaccctgccccagggaactcagaggctacacctagaatattgcagctggaaagggtgcccatttggttatgactgtgtgctctgtcttatatggaagcatctgtatacctccatattatttacaatagggtggtgaggaatcctggaagactttgaacctcatggagatataggaggaatcaaatgcctattctgccaaaatctggatctccaaaatgttaagtcctagtcatcagagaatcacagatgaggtctggcctgttggtgaccaaatgcaagtcttatgattcccactgcttttgcattatttgttctcttcctatgctccagacatgccccttcaagatggcgaatgcagatgggaggatcctaaaagaatactccccacctctgatgtcatggtattggccagctcctgcatcatttccatactttggccacagctgatgctcatagtgagtccataactgatgctgtcatcagcaatatgtgccccacccaacctctagttcatcctaacaaacctaggatgcctaaatcatgcagtacagaaggttatctgaaatgcaagggttgggtttaggtgctaagtgcaatatctatcaccaagaaaagtccattagccaaaaatatagttgcaataactatgacatgaagcattcaaagatagtcttctatccagaggaagtctcttataactctcccattaaatatacattctttagaattatacccatcagttaatgtgtccagtgtcttaacttgggaagagttcacttcttgaaaatttttagtgacagatggtaaaatgtagaagtaagtatctgagtgaaagggcactaaacttcagatttctgaggctattctggatcattgtggctagtacatggtgacaccttgccatgttgattcaagtattctattatttaaagtcttcttggattatagtttttaaattaatttatttatgttttaattgacaaaaaattatatgtatttatcatgtacaatatgatgttttgaaacctggatacattgtggaatgatattgtggaatgactaaatctaactaatatatgcattacctcacttattttttatggtgaaaacactcaaaatccactctcttagtaatcttcaggaatacaatacattaactgtagtccccatgttgtacagcaaatctcttagctcacttctcctatctaactgaaatattgtatctccaacatctccccagcatccacccctcagaccccggtagacaccattctaccttgttcctgtgaattgaatttctttggatttcatattaaagtgagattatgtgatatttatctttctgtgcctgcttattttacttaacataatgctctctaggttcgtcatgttgttgcaaatgacaggatttccttctttttaaaagctgagtaatattttattgtttatatatgttgatgcttccatgtcttggctgttacgaataacactgcaatgaactggagtgcagatatctctttggcatactgattttatgttccagtatgccaaagagtatccagtagtctaattgctggataatgtggtaattctatttttgttttttttaggaacttccatactattttccatatgggtatactaatttgcattcacaccaacagtgtgcaagaattcccttttcttcacatccttgccagcccctaggatattctgtctaattgataataaccattccaacaggtaggtgtgagatgataactcatcatggttttaatttgcatttctctgatgattagtgatgttgagcattttttttcatctacctattggctatgcatgtcttcttttggtcctttgccaattttttaatcaggttgtttgcttgctggtgagttgtttgagttccttacatattttggatattagcccttatcagatgcatggtttctaagtattttctcccattccataggttgtctcttaactctgttagttgttttctttgtggtttgatattatcccacttgtctagttttggttctcattgcctagaccaatgtaatggagcttcccttctatgttttcttctagtacttttacagttttaggttttaggttttacatttaattatttaatccatttagaattgatttttgtatatgatgtgaaattagggtccaatttcattcttctgcatgtgagcatccagttttgccaggaacttttattgaagaggctgttctttgccagttgagttttattggtatctttgtcaaaatcagttgaccataaatgattctgtttgtttctaggttctctgtcatattcctttgatctatgtttctgctttaaatgccagcattatactgttttgatttttataactttgtaatatactttaaaaccaggtagtgtgatatgttcagctttcttgtttttgcccaagatagttctagcaatttggggtctttgggattccatataaattttaaggtttttttctatttctgtgaaaaatgtcattggaattttgatatgattgcattgcatctgtagaacactttgggtagtatggacattttaacaatattattaattcttccaatctgtgaaaacagaatgtctccacttatttgtgtcttcttcaatttctttcatcaatgtttcagtttccagtgtacaagtttttaacctccttgtttaaatttatttctaagtatcttttttttgctagctattgtaaatgggattgtttcctagacttcctttttgatagttcatttttactgtatagaaatgctactgattttttgtatgttgattttatgccctgcaactttatcaaatttgtccattatttctaaacagttgttttagggttttctgtatatcagagcatgtcatctgcaaacaaggacaaattaacctctttcttttcagtctggatgccttttatttatttatttatttttttttttttttctttttttttgagatggagtctcgctctgtcacccaggctggagtg[133 bp omitted]gagacggggtttcaccgtggtctcgatctcctgacctcgtgatccgccctcctcggcctcccaaagtactgggattactggcgtgagccaccgctcccagctcttgtattctctgcctaattgctccagctagcactttcagtactatgttgaatagaagtgacaagaaagagtgggcatccttgccttattcctgacattagaggaaaagttttcaactttccaccattaagcctgatataagctgtaggcttttcatatatggccttcattgaattgaggtacgttcctcctttacctaatttgttgaaagttcttatcatgacagcgtgttgaattttgtcaaatgttttttctgcatctgaggagatgatcatatggtttttgtcctttgttatattaatgtggtgttatcacatttatggatttgtatatgttgcatcatcgttggatcctagagataaatcccacttgattttggtacataatatatttaatgtgttattgaattagttggctagtacttcgttaaagattcttatatatgttctattaggctgttcttgcgttgcaaaaaggaatactcaagattgggtaatttataaagaaaagaggcttacttggctcatggttctgtaggctgtgcaagcatagtgccagaatgtgtttggattctgggaaggcctcagggagcttttactcatggcagaaggaaaagcaggagcaggcacctcacatggccagagtgcaagcaagagagagagggggcagggaggtgccacacatttttaaacaaccagatctcatgagaactcatcatcatgaggacagcaccaagccatgaggggtctgcccccatgacccaaacacttcccaccaggccccacctccaacactggggataacaattcaacatgagaatttgttggaacaaatattcgaaccatatatattcactatgggtattggcctataattttctttctttttttttttttctcacgcttaattcactttatttttcttgtataaaaaccctatgttgtagccacagctggagcctgagtccgctgcgcggagactctggtgtgggtcttgatgaggtggtcagtgaattcctcatagagagacttggtaaatacagtctccttccagaggtcggggggcaggtagctgtaggtcttagaaatggcatcaaaggtggccttggcgaagttgcccagggtggcagtgcagccccgggctgaggtgtagcagtcatcgataccagccatcatgagcagcttcttaggcacaggtgcggagacaatgccagtgcccctgggtgcagggatgaggcgcaccagcacagagctgcagcggcctgtcaccttgcaagggacggtgtggggcttgccgatcttgttgccccagtagcctctgcacacggggacaatggagagcttggccaggatgatggccccacggatggcggtggccacctccttggagcacttaacacccagaccgacgtggccattgtagtccccgatagcaacaaacaccttgaacctggtgcgctggccggcacgggtctgcttctgcactggcataatcttcaaaacctcatccttgagagacgtccccaggaaaaagtcaatgatctctgattccttaatgggcagggagaagagatatatctcctccagggacttgatcttcatgtccttgaccaagcggcccaacttggtgacaggcatccactccttatcctcgggcttgccttcgcgagctccgcggccttggccccggccccgtccacggccgcgaccccggccccggatgccactgccgaaacctccgcggaagccaccgcggttccccatcccagggccaccagggcctccgggcctccccgctgcaccggcgtcatccgccatttggtgttttctcggaaaagaagtaattttctttatttgtagtgtccttgtctggatttagtatagaggtaatgctcaccttgtaaaatgagtttggatgtatttcctcttcttccattttttggaagattttggaaggatcaatattaattctttataaatgtttggtagaattcagcaataaagtcatcaaatcctgggctcttttttttgataggaggcttttattattgattcaatctccttactttttattggtcctttcagatttccagtttcttcatgattcagttttgataggtttatgtgtctaggaatttatctatttcttcttgcttgtataattttttggtatataattgtttatagtagtctcttacagtacattgttgtttatctggtatcagttgttatgccttttttctttgtgatttcatttattttagtcttttccctttatttttcatagtctacctaaagttttctcaattttatttagcttttcaacacctgactcttagtttcactgatcttttctattatttttctattttatttatcacatctatttttgctctggtctttattatttttttccttctgctaaatttggacttgtttgttcttgtttttctacttccttgaggtataacattagattatttcagatatttctacttttttgatgtggatatttattgcttatctaaactttcgtcttagagttgcttttgctgcatcccctaagttttagtatgctgtgtttccagttttgtttgtctcaagatatttttaaatttcccttttaatttcttcattgacccactggttattcggagcatgttgttcaatttccacgtgtttgtgaattttcagaaattcctcctcttattgatttctagttttataccattgtggtcagaaaatatagttgatatgacttcagtctttgtaaatttgttgaaacttattttatggtcaaatatattatctatcctggaaaatgttccacgtgcacttgagaagaaaatatattcagctgctgttggatggaatgttctgtatatgtttgttagcccatttggtctaaaatctagttcaagtgtgttgttttcttgttgattttctgtctacatgatctgctcattgctgaaagtggggtattaaagtcccctattattatacattatagtgtaactctcccttcagatcttttaatatttcctttatatttagatgcttcagtattggatgaatacatatttatcatcgttatattttcttgatgaattgacctctttatcgttgtacaatcattttctttgtcctgtattacagtttttgacttaaggtctattttgtcaatataaacatagctacccttgagctcttttggtttctctacctttttctacctctttaccttcagtctatgtgtgtccttaaaggtgaagtgagtctttttcagacagcatataaatgggccttgttttttatctattcagtcactctatgccttttgattggagaatttaatctattacattcaaagcaattgttgagaaggaagggcttactactgccattttgttagttgttttctggttatttcgcagatcctttattcttcctctcttactggcttccattgtggtttgatggttttctgtggtgtgatttgaatctgttcttttaatcttatgtatgtgtgctgttggttttcactttgtgtttaccatgaggctttcaaaaaacatcttagagttataataaactatttaagctgataacaatttaacttcgataacataaaaaactataagattttttgggcagagcggtggggggtgatgggtgcagtggctcatgcctttaatcccagcactttggaggccaaggcaggtggatcacttgaggccagcctggccaacatagaaaacctcatctctgctaaaaatacaaaaagttagttgggcgtggttgcacatgcctgtaatcccagctactcaggaggttgaggcacacaagaatcactggaacccagaaggcagaggtggcagtgaaacgagatcattccactgcactccagcctgggcaacagagcaagactctgtctcaacaacaacaacaaaaatacgatacactttttctctactaccaccatgccctgcattttaaatttttgatatcacagtttacatctttttatattgtgtgtccctgaaaaattattgtggctattaattttaataataactttgtctttcaaccttcgtactaaagatatatgtgatttgcacaccaccattcagtattagagtattctgaatttgactgtgttcttactttgaccgttaagttttatatgttttatgttgctaattagtatattttactttaagcttgaatattccctttagtatttcttgtaaaatcagcctggtgatggtgaactccctcagcttttgtttgtcttggaatgtctttatctctccttcatttctgaaggatagctttgcagggtgtagtatttgggcttgacaggtttttttcctccagcattttaaatatatcatcccactcgctcctggcatgtaaggtctgccaagaaatctgctactaaccttattggaactttattatgtgagatttttttattttcttttgctgctttcaggatcctctctttgtccttgatttttgacagtttggttatcaaatgtcctggtgtagtcttgtttagattgaatttcattggacaattttgaccttcctgtacctggatatttatatttgtctcccaatttggaaatttttctgctaatatttctttaaataacttttctacccctttgtctttctcttctccttcatgaactcccataacttggtatttgatcttttgatgctgtcccataaaccctgtcagctttcctttttgttgttgttgagttttgtttgtttgcttgcttggggcttgcttgtttttgagacagggcctcagttctgtcacccaggctggagtgcagtggcacaatcatggctcactgcagccttgacctcccaggctcaagtgacactcccacctcagccccccaagcagctggagctgggactacagatgcaagccaccatgcccagctaattttttttgtagagggcatgggtctcactttgttgcccaggctagtctcaaactcctgggctcaagtgatactcccacctcagcctcccaaaatgctgggattacaggtatgagccactacacccagcaatcttataagttttctttattccttctcattctctttttctcctctgactgtatattttcaaataacctatctttaagttcacaaatgctttcttctgctcaatttcttatctattccatttttcatttcattgtattttttagctccagtttgatatttgatttctgtttgatatgttctataatttcaatctctcattaaatttatcattttggtcattttattgtttgcctgatttgattgaattgtttctctgtattttcttgaagttcactgagtttccttaaaacaattattttgaattgtctgtcaggcagttcatatatctccattcctttggtatcagctactaagagatcactgtattctttttttttttcttttttttttttttattgatcattcttgggtgtttctcacagagggggatttggcagggtcataggacaatagtggagggaaggtcagcagataaacaagtgaacaaaggtctctggttttcctaggcagaggaccctgcggccttccgcagtgtttgtgtccctgggtacttgagattagggagtggtgatgactctcaatgagcacgctgcctttaagcatctgtttaacaaagcacatcttgcaccacccttaatccatttaaccctgagtggacacagcacatgtttcagagagcacagggttgggggtaaggtcacagatcaacaggatcccaaggccgaagaatttttcttagtacagaacaaaatgaaaagtttcccatgtctacttctttctacacagacacggcaaccatccgatttctcaatcttttccccacctttcccccctttctattccacaaaaccgccattgtcgtcatggcccgttctcaatgagctgttgggtacacctcccagacggggtggcggccgggcagaggggctcctcacttcccagtaggggcagccgggcagaggcgcccctcacctcccggacggggtggctggtcgggtggggggctgacccccccacctccctcccggacggggcggatggccgggcagaggggctcctcacttcccagtaggggcggccgggcggagacgcccctcacctcccggacggggcggatggccgggcggggggctgacccccccacctccctcccggacagggcggctggccgggcagaggggcttctcgcttcccagtaggggcggctgggcagaggcgcccctcacctcccagacggggcagctggccaggcggggcgctgacccccccacctccttcccggacggggtggctggccgggcggggggctgacccccccacctccctcccgggtggggcggctggccgggtggagacgctcctcacttcccagacggtgtggttgccgggcggaggggctcctcatttctcagatgggacggttgccaggcggagggtctcctcacttctcagacggggcggccgggcagagacgctcctcacttcctagatggggtcgcggctgggcagaggcgctccccacatctcagatgatgggcggccgggcagagacactcctcacttcctagatgggatggcggccgggaagaggagctcctcacttcctagatgggatggcggctgggcagagacgctcctcactttccagactgggcagccaggcagaggggctcctcacatcccagatgataggcagccaggcaggacgctcctcacttcccagacggggtggcggccgggcagaggctgcaatctcggcactttgggaggccaaggcaggctgctgggaggtggaggttgtagcgagccgagatcacgccactgcactccagcctgggcaccattgagcactgagtgaacgagactccgtctgcaatcccggcacctcgggaggccgaggctggcagatcactcgcggttaggagctggagaccagcccggccaacacagtgaaaccccgtctccaccaaaaaaatacgaaaaccagtcaggcgtggcggcgcgcgcctgcaatcgcaggcactcggcaggccgaggcaggagaatcaggcagggaggttgcagtgagccgagatggcagcagtacagtccagcttcggctcggcatcagagggagaccgtggaaagagagggagagggagaccgtggggagaggggagaggggagagagaggagagaggagagaggagagaggagagatcactgtattctttggtgttctccttgtatttttttttgttattgccttacattaatgtgtgtgcatttgaagaaataaggacatttcagtctttgaagactagttttttctggggaagccctttatcagtcatccggaggttcgggagaggccatctggcatgatcccaggtcatacttgctgctagagtcctcaggcaggctggcctggttcctgggtcaggaggtgggtgggcctggtgcttgagtccacagggttgggcctgaaggctggatccactggggtgaatttgttgattgggtctgcaggaatggtgttggagccagggttcaagaaggcaggcctggaccttgtatcagtgaaggccagcctcatgcctgggtacacaggagctaacctggctctgggatggaccgtgagcctgaatctacagggtctggccaagttctgggagggggatggcacctgggactattgagatgggtctggagcctgagtacctcagggctgtcctggagcttatgtctgcaggggtgttcttggagcctcagcctatgggatccggcctagaactgagttctactggggtgggcctggaccctggatctgctatatcaggcctggactctgggttcactgggccttgggtgcacatggactggcctggagcctacagtcaacctggtactggggctagtgtggagtttggttcacaagggctggtctggagcctcaagatcatgggcactgacctggtgcctagagtcactggagctgtcctggagcctagagccaagaagcctggtccagctctggagtctactgagactcttggaccttcagtcaaatggagggtggtgctatggagactggcctggcactgtgcaggcctgagcctgtgtctgtaggtatcttcctggtgtttaaggccagggatgctgatctggcactggaatgggtgggaagcctgaggccacgggggttggcttagtactgagtggtcctggatcttgtatttgtagggcctggcctggaggctgagtctgcacatgctggtctgaggagtagggctgtggaaatcaacctggtgctgaggtagacttgaagcctgaagctatgagggccagcccagtgctggagaaggtccagagcttagggccttggggtctgcctggccctgggatgggcttagaacatgactctgttggggctagcctgaagctaggactgctggggcctgtctgccactggggccgctagggttgagctggcactagagcagacccagagatcaagtctactaggcagacctggagcctggggctgctgaggtcagcctatttgtaatttctttcttctgacaattagaaaccttactcaaattatcttccagttatttacttatttgtttaaacttgtatatatggaaagtagttttagaattgtttatccatatctctgtgagaaaccatttaccagacacctgctctctaaacaactgagtgaaagtgctactgaaaattccccacattaaaaatgggacagaaataaaattctgttctgtgaagcccatgaaattagcttatcagttctaagcttatcagatgggacagcaaaagttggaaggtagtctacaatgtaggagaggaacaatactggggatttgtaataagggtactcatgggtggtgggatgagctgaaaaaaggcaaggccactactggtaaataagtttatttgtcaagtgtttgctgttgtccagctctcagtaaaaatagactggtgttcctaaaagtagccacagggtactactatgagacctcttaaacatttcccagcccacacaggtggcagcctggtgggaagctacggttttagtaatctccactggtttcctgtaaaacaaaaaggttagatttttagaggctagagaactctgagaaacaagcattcattccccctgcttaatagtatccatgttcaccagacaatgggacaagaatactttaacgtaacaacaggagttgtccacttctgagtaggtgaggtattggacaaaaaaaggtggagactttgggcctggctgagccaaatggcccatgggaaagtctgactatggaagcagtggttagaaatctggacaaatttaggaaaaatagcaaactatggtgtaatacaaagaagacaacacagacaggtattgattatataatgaaagaaacaatggggtctaagctggtgtcttgatttactcgccagtgaattgctttccaagttaaagggacattgtcttctgttatttttgtacctagaatttggggtacctcagtcttctgtttaggaataacagcctccgagaagggaatgagaatcagtgaagatatacacccaagcaaacatctcccaactcacgacgtttatccagcagatgtttccacaataggtccagcagcatgtgtaatttttgtctttacatctaaaggctttagaacacttattggtacattctttgacatttggctttccccagcattcttcaagtaacaattccttccctgaaattgagatgagatggtcaaaggttgatggtatgtttcagccaagagcggaaagaaaggcctttcatacgtttaacagttcctcctggaatctgggccccaaattccaaccaagatatctatttgccttttaagggaattgccttcatgagcctcctcaaattcctgtcattatacattcactgaccctattgcatcttcactgacttcttttccttctcgacctctgcaggctttaccagtgttgcaggcctctgggccctctctgagcatcccaacgataaaactcagtcaacccggagcattcatgtaacctcctataaaatctgcatttacataacaggagatctcagggcccggcatatcttgtagcctcattgcaatgcctatttcacagagtggggagctaggccaggtcaagtaagaaacagattctctccctttttctttccctacttgctgactctgtgtttaataactcagcctctcttcaaattcttatctctctcactcagttttcttagcccctctattcaccccattttctcatcatatgacccccaaggttgccccactaagaagggatctcaagcctctttcctaacttttcacattctgaaagccttgccactgaaactaagggtatgtattaagaaatgcccatttggtactcatatgacaaagtatatgcagctagggcacagggataccagtatagagctacaggattagctctatactgacatctgaccctcaaagacagcctaacattggaaaatatttttatgtttatagcttatggtatatatacacacacacacacacacatgtgtttgtatatatatagagagagagagagagagacagagagagagagatagacagatattgctattttaaaggttaaaagaggaagcattgaaggacctcagcttagggatttcttgaatctctgtgcatacaaaattgtcattctctgatgggtgatactacgaaggtgggtcctgagtcagatacagcggacaatgaaaccccctcccttgttcagaaacaagctcatccccctcctgtggcccctaatccagcctcaccacctactgtcatatcttttcttcctcatttctcccagcacagacagtagcaccgtacagaagaatgtcatgagcatgggtatccagagcttcatgaggctgaccatatgtgtctgaatatgtgttgtcagaaggattatttttcttcccagtcgctgctagagatcaagacatataaatagggaaagagaggtgtgaagcaagagaaagtgcttgtcgaatttcttcattctttatcttctcactattccccctaggcctctgcctacccaacaactggcacacctaagctgagcgttggctttgccaaaaggaatccctccatctcacacctcatgttttccttttgctggaaaaaaaatataatgtgttgccttattttgattaaaacataattcaaattcagcttacaaaaaaatttttttaaatcgtttattttaggtttggggtacatgtgaaggtttgttacacaggaaaacttgtatcatgagagtttgttgtacagattatttcatcacccaggtattaagcccagtacccaacagtcatcttttctgctcctctccctccttccacccttcaccctcaagtagaccccagtgttggttgttccttctttgtattcatgagttctcatcatttagctcccacttataagtgagaacatgcagtatttggtttgaacaaaattctttttgaaaatgtattcaacatttattgaacacctactatgtgcccagcactattatacaccatatatatagagagggtccttaacttatgatggtttgacatacaacttttcaactttatgatggtgcaaaaggcaatatacatccagtacaaatcgtactttcagtacccatcaaccattctggaggggttttttttgttttgtttgtttgtttgtttttgttgttgcataatattccattctgtgaatatgtcacacaatatttattcattttcatgaaaatgaacatttaggggctgaataggaacagctccagtctacagctcccagcgtgagcgacacagaagacaggtgatttctgcatttccagctgaggtaccgggttcatctcactggggagtgtcagaaagtgggtgcagcacaccgagcatgagccaaagcagggcaaggcattgcctcacctgggaagtgcaaagggtcagggaattccctttcctagtcaaagaaaggggtgacagacggcacctggaaaatcgggtcactccgaccctaatactgcgcttttccaacagtcttagcaaatggcacaccaggagattatatcccatgcatggctcagagggtcctatgaccacggagcctcacacattgctagtacagcagtctgagataaaactgcaaggcggcagcgaggctgggggaggggcaccctccattgccgaggtttgagtaggtaaacaaagcagccaggaaacatgaactgggtggaggctaccacagctcaagaggcctgcctgcctctgtagactccacctctgggggagggcattgccaaacaaaaggcagcagaatcctctacagacttaaatgtccctgtatgacagctttgaagagagtagtgtttctcccagcacgcagctggagatctgagaacagacagactgccttctcaagtgggtccctgacccccgagtagcctaactgggaggcactccccagtagggcagactgacacctcacacagctgggtactcctctgagacaaaacttccagaggaacgatcaggcagcaacatttgctgttcaccaatctccgctgttgtgcagcctccactgctgatacccaggcaaacagggtctggagtggacctcgagcaaactccaatagacctgcagctgagggtcctgactgttagaaggaaaactaacaaacagaaaggacatccacaccaaaaccccaactgtacgtcaccatcatcaaagaccaaaggtagataaaaccacaaagatgggggaaaaacagagcagaaaaactggaaactctaaaaatcagagtgcctctcctcctccaaaggaagacagctcctcaccagcaatggaacaaagctggatggagaatgactttgatgagttgagagaaggcttcagacgatcaaactactctgagctaaaggaggaagttcgaacccatggcaaagaatttaaaaaccttgaaaaaaaattagacgaatggccaactagaataaccaatgcagagaagtccttaaaggaattctgatggagctgaaaaccaaggcatgagaactatgtgacaaatgcacaagcctcagtagccaattcgatcaactggaagaaagggtatcagtgatggaagatgaaatgaatgaaatgaagcgagaagagaagtttagagaaaaaagaataaaaacaaatgaacaaagcctccaagaaatatgggactatgtgaaaagaccaaatcttcgtctgattggtgtacctgaaagtgacagggagaatggaaccaaggtggaaaacactctgcaggatattatccaggagaacttccccaatctagcaaggcaggccaacattcaaattcaggaaatagaatgccacaaagatactcctcgagaagagtaactccaagacacataattgtcagattcaccaaagttgaaatcaaggaaaaaatgttaagggcagcaagagagaaaggtcgggttacccacaaagggaagcccatcagactaacagtggatctctcggcagaaactctacaagccagaagagagtgggggccaatattcaacattcttaaagaaaagagttttcaacccagaatttcatatccagccaaactaagcttcataagtgaaggagaaataaaatactttatagacaagcaaatgctgagagattttataaccaccaggcctgccctacaagaagagctcctgaaggaagcactaaacatggaaaggaacaattggtaccagccacttgaaaaacatgccaaattgtaaagaccatcgagactaggaagaaactgcatcaactaacaagcaaaataacagctaacatcataatgacaggatcaaattcacacataaccatattaaccttaaatgtaaatgggctaaatgctccaattaaaagacacagactggcaaattggataaagagtcaagacccatcagtgtgttgtattcaggaaacccatctcacatgcagagacacacatacgctcaaaataaagggatggaggaagatccaccaagcaaatggaaaacaaaaaaagtcaggggttgcaatcctagtctctgataaaacagactttaaaccaacaaagatcaaaagaggcaaagaaggccattacataatggtaaagggatcaattcaacaagaagagctaactatcctaaatatatatgcacccaaaacaggagcacccagattcataaagcaagtcctgagtgacctacaaagagacttagactcccacacaataataatgggagactttcacaccccactgtcaacattagacagaccaacaagacagaaagttaacaaggatttccaggaattgaactcagctctgcaccaagaggacctaatagacatctacagaactctccaccccaaatcaacagaatatacattcttctcagcaccacactgcacttattccaaaattgaccacatagttggaagtaaagcactcctcagcaaatgtaaaagaacagaaattataacaaactgtctctcagaccacagtgcaatcaaactagaactcaggattaagaaactcactcaaaaccactcaaatacttggaaactgaacaacctgctcctgaatgactactgggtacataacaaaatgaaggcagaaataaagatgttctttgaaaccaatgagaacaaagacacaacataccagaatctctgggacacattcaaagcagtgtgtagagggaaatttatgacactaaatgcccacaagagagagcaggaaagatctaaaactgacaccctaacatcacaattaaaagaactagagaagcaagagcaaacaaattcaaaagctagcagaaggcaagaaataactaagatcagaaaggaactgaaggaaatagagacataaaaaacccttcaaaaaatcaatgaatccaggagctggttttttgaaaagatcaacaaaactgatagactgctagcaagactaataaagaagcaaagagagaagaatcaaatagatgcaataaaaaatgataaaggggatatcaacaccgatcccacagaaatacaaactaccatcagagaatactagaaacacctctatgcaagtaaactagaaaatctagaagaaaggcataaattccttgacacctacaccctcccaagactaaaccaggaagaagttgaatcgctgaatagaccaaaaatgggctctgaaatagaggcaataattaatagcttaccaatcaaaaaaagtccaggaccagatggattcacagccaaattctaccagaggtacaaggagaagctggtaccattccttctgaaagcattccaatcaatagaaaaagagggaatcctccctaacccattttatgaggccagcatcatcctgataccaaaggctggcagagacactaccataaaagataattttagaccaatatccctgatgaacattggtgcagaaatcctcaataaaatactggcaaactgaatccagcagcacatcaaaaagcttatccaccatgatcaagtgggcttcatccctgggatgcaaggctggttcaacatatgcaaatcaataaacataatccagcatataaacataaccaacgacaaaaaccatatgattatctcaatggaggcagaaaaggcctttgacaaaattcaacaacccttcatgctagaaactctcaataaattaggtattgatgggatgtatctcaaaataataagagctatctatgacaaatgcacagccaatatcatactgaaggggcaaaaactggaagcattccctttgaaaactggcacaagacaggaatgccctctctcaccactcctattcaacatagtgttggaagttctggccagggcaatcaggcaggaaaaggaaataaatggtattcagttaggaaaagaggaagtcaaattgtccctgtttgcagatgacatgattgtatatctagaaaaccctattgtctcagcccaaaatctccttaagctgataagcaacttcagcaaagtttcagaatacaaaatcagtattcaaaaatcacaagcattcttatacaccaataacagacaaacagagagccaaatcatgagtgaactcccattcacaatagcttcaaaaagaataaaataccgaggaatccaacttacaatggacatgaaggacctcttcaaggagaactacaaaccactgctcaatgaaataaaagaggatacaaacaaatggaataacattccatgctcatggctaggaagaatcaatatcgagaaaatggccatactgcccaaggtaaattatagattcaatgccatccacatcaagctaccaatgactttcttcacagaattgggaaaaactactttaaagttcatatggaaccaaaaaagagcccacatcgccaagtcaatcctaaaccaaaagaacaaagctggaggcatcacgttacctgacttcaaattatactacaagcctacagtaaccaaaacagcatagtactggtaaaaaaaaacagagatatagacgaatggaacagaacagagggctcagaaataacaccacacatctacaaccatctgatctttgacaaacctgagaaaaacaagcaatggggaaaggattccctatttaataaatggtgctgggaaaactggctagccatgtgcagaaagctgaaactagatcctttccttacaccttatacaaaaattaattcaagatggattaaagacttaaatgttagatgtaaaaccataaaaaccctggaagaaaacctaggcaataccattcaggacataggcatgggcaaggacttcatgactaaaacaccaaaagcaatggcaacaaaagccaaaatagacaagtgggatctaattaatctaaagagcttctgcacagcaaaggaaactaccatcagagtgaacaggcaacctacagaacgggagaaaatttttgcaatctacccatctgacaaagggctaatatccagaatctacaaagaactcaaacaaatttacaagaaaaaaccaaacccatcaaagagtgggcaaaggatatgaacagacacttctcaaaagaagacatttatgcagccaaaagacacatgaaaagatgctcatcaccactggccatcagagaaatgcaagtcaaaaccacaatgggataccatctcacaccagttagaatggagatcattaaaaagtccagaaacaacaggtgctggagaggatgtggagaaataggaacacttttacactgttggtgggactgtaaactagttcaaccattgtggaagtcagtgtggagattcctcaaggatctagaactagaaataccatttgacccagccatcccattactgggtatatacccaaaggattataaatcatgctgctataaagacacatgcacacgtatgtttattgaggcactattcacaatagcaaggacttggaaccaagccaaatgtccaacaatggtagactgaattaagaaaatgtggcacatatacaccatggaatactatgcagccatgaaaaaggatgagttcatgtcctttgtagggacatggatgaagctagaaaccatcattctcagcaaactatcgcaaggacaaaaaaccaaacactgcgtgttctcactcataggtgggaattgaaccatgagaacacatggacacaggaaggggaacatcacacaccagggcctgttgtggggtggggggaggggggagggatagcatttggagacatacctaatgttaaatgacgagttactgggtgcagcacaccaatatggcacatgtatacatgtgtaactaacctgcacgttgtgcacatgtaccctaaaacttaaagtataataaaaagaaaatgaacatttaggttgtctgcagtggtttcactgttgaaactataaaactaaagcagccatgaacaagtacactattcttctgcacatgaatgagaattgttcccccttccatccatgcttaatttttctctttaatgttttttattttcagtacagtattaaatacattacatgagctattcaacactttattataaaataagctttgtgttagataatttcgcccaacagtaagctaatgttaagtgttctgagcacatttaaagtgttagcttacaaaattcttaaaacataaaaaagcacatagaacatagtgaaaatatttctagcaattccactatatcgatgtataatattctatctttcatatgtgcatagatataaatatagattttttataaaacaaaattatataagcttgctgttatataatgactttttgaaaactattaagatataactgacatataaaaaactatttataggacatatttaatgtatacaactacaatgagtttgaagacaagtatacacccatgtaatcatcatcacaatctaggccataaacatatccatcacctccaatagtttccactggcctttttacttattatttggtgtgtgtgtgtgtgcaataaaaataagacctatcatcttaacaaatttttaagtttgcaatacagtattgctaactaagggcactatgctatacaacaagtctctgagatgtatccatcttgtataactgaaattttgtgccctttgactaatatcttcaatctctctgcttgttattggtctgttcagggtatctaattcttcctgatttaagttaggagggttgtatttttccaggaatttatccatctcttctaggttttctagtgtatgtgtgtaaaggtgttcatagtagcgttacatgatcgtttgtatatctgtggtgtcagttgtaatatctcccatttcatttcttaatgagcttatttggattttctctcttattttctcggttaatcttgctaatggtatatcaattttatttatcttttcaaagaaccagctttttgtttcatttatcttttgtatttttttgtttcaatttcatttaattctgctctgatcttggttattttctttttttatcacactttaagttctggagtacatgtgcagaatgtgcaggtttgttatataggtatacacgtgccatggtgatttgctgtacccatcaacccgtcatctacattaggtatttctcctaatgctatccctcccccacatcccccgccgacaggcccaggtgtgtgatgcccacccccccgtccatgtgttctcattgttgaacttccacttatgagaacatgcagtgtttggttttctgtccttgtgttagtttgctgagaatgatggtttccagcttcatccatgtccctacaaaggacatgaactcatccctttttatgactgcatagtattccatggtgtatatgtgccacattttcttaatccagtctatcattgatggacatttgggttggttccaagtctttgctattgtaaatagtgctgcaataaacatacatgtgcatgtgtctttatagcagcatgatttataatcctttgggtgtatacccagtaatgggattgctgggacaaatgatatttctagttctagatccttgaggaatcaccacactgtcttccacaagggttgaactagtttacagtcccaccaacagtgtaaaagtgttccatttctccacatcctctctagcacctgttttttcctgactttttaatgattgccattctaactggcgtgagatggtatctcattgtggttttgatttgcatttctctaatgaccagtgatgacgagctttttttcatatgtttgttggctgcataaacgtcttcttctgagaagtgtctgttcatatccttcgcctactttttgatggggttgtttggtttttttcttgtaaatgtgtttaagttctttgtagattctggatattggccctttgtcagacggatagattgcaacatttttctccgattctgtaggttgcctgttcactctgatgacagtttcttttgctgtgcagaagctctttagtttaattagatcccatttgtcaattttggcttttgctgccattgcttttggtgttttagtcatgaagcctttgctcatccctatgtcctgaatggtactgtctaggttttcttctagggtttttatggttttaggtcttgtgtttaagtctttaatccatctcgagttgatttttgtataaggttaagaaaaggatccagtttcaacctcctgcatatggctggccagttttcccagcaccatttattaaatagggaatgctttccctattgcttgcttttttcagctttgtcaaagatcagatggttgtagatgtgtggtgttatttctaaggtttcttctgctgggtttggatttggttcttgtttctctagtcccttgagctgtgacattagcatgtcaatttgtgctctttcagtctttttgatgtaggcatttaggggtatgaactttcctgttagcactgcctttgctttatcccagaggttttgataggttgtgtcactattgttgttaagttcgaataattttttaatttccatcttgatttcatttttgacccaatgatcattcaggaacaggttatttaatttccatatatttgcatggttttgtagctgtttttggaattgatttccagttttattccactgtggtatgagagagtgcttgatataatttcaatttcctttttttgaaattttattttattattattatactttaagttttagggtacatgtgcacaatgtgcaggttagttacatatgtatacatgtgccatgctggtgtgcttcacccattcactcgtcatttagcattaggtatatctcccaatgctatccctcccgcctctccccaccccacaacagtccccagagtgtgatgttcccctttctgtgtccatgtgttctcattgttcaattcccacctatgagtgagaatacgcggtgtttggtttttttgttcttgtgatggtttactgagaatgatgatttccaatttcacccatgtccctacaaaggacatgaactcaccattttttatggctgcatagtattccatggtgtatatgtgccacattttcttaatccagtctatcattgttggacatttggctcggttccaagtctttgctattgtgaatagtgcctcaataaacatacgtgtgcatgtgtctttatagcagcatgacttatattcctttgggtatatacccagtaatgggatggctgggtcaaatggtatttctagttctagatccttgaggaatctccacactgacttccacaatggttgaactagtttacagtcccaccaacagtgtaaaagtgttcctatttctccacatcctctccagcacctattgtttcctgactttttaatgattgccattctaactggtgtgagatggtatcccattgtggttttgatttgcatttctctgatggccagtgatggtgagcattttttcatgtgttttttggctgcataaatgtcttcttttgagaagtgtctgttcatgtccttcacccacttttttatggggttgtttgtttttttcttgtaaatttgtttgagttctttatagattctggatattagccctttgtcagatgagtaggttgcgaaaattttctcccattttgtaggttgcctgttcactctgatggtagtttcttttgctgtgcagaagctctttagtttaattagatcccatttgtcaattttggcttttgttgccattgcttttggcgttttagacatgaagtccttgcccacgcctatgtcctgaatggcaatgcctaggttttcttctagggtttttatggttttaggtataacgtttaagtctttaatccatcttgaattaatttttgtatacggtgtaaggaagggatccagtttcagctttctacatatggctagccagttttcccagcaccatttattaaatagggaatcctttccccattgcttgtttttctcaggtttgtcaaagatcagatagttgtagatatgcggcgttattactgagggctctgttctgttccattgatctatatctccgttttggtaccagtaccatgctgttttggttactgtagccttgtagtatagtttgaagtcaggtagtgtgatgcctccagctttgttcttttggcttaggattgtcttggtgatgcgggctcttttttggttccatatgaactttaaagtagtttttcccaattctgtgaagaaagtcattggtagcttgatgtggatggcattgaatctataaattaccttggacagtatggccattttcatgatattgattcttcctagccatgagcatggaatgttcttccatttgtttgtatcttcttttatttcattgagcagtgatttgtggttctccttgaagaggtccttcacgtcccttgtaagttggatacctaggtattttattctctttgaagcaattgtgaatgggagttcactcatgatttggctctctgtttgtctgttattggtgtataagaatgcttgtgatttttgaacattgattttgtatcctgaaactttgctgaagttgcttatcagcttaaggagattttgggctgagacaatggggttttctagatatgcaatcatgtcatctgcaaacagggacaatttgacttcgtcttttcctaattgaatacactttatttccttgtcctgcctaattgcccaggccagaacttccaacactatgttgagtaggagtggtgagagagggcatccctgtcttgtgccagttttcaaagggaatgcttccagtttttgcccattcaggatgatattggctgtgggtttgtcatagatagctcttattattttgagatacgtcccatcaatagcaaatttattaaaagtttttagcatgaagcgttgttgaatttttgtcaaaggccttttctgcatctattgagataatcatgtggtttttgtctttggttctgtttatgtgatggattacgtttattgatttgtgaatgttgaaccagccttgcattccagggatgaagccaacttgatcatggtggataagctttttgatgtgctgctggattcagtttgccagtgttttattgaggatttttgcagcaatgttcatcagggatattggtataaaattatcttttattgtagtgtctctgccagcctttggtatcaggatgatgctggcctcataaaatgagttagggaggattccctctttttctattgattggaataatttcagaaggaacggtaccagctcctctttgtacctctggtagaattcggctgtgaatctctctggtcctggactttttttggttggtaggctattaattattgcctcaatttcaaagcctgttattagtatattcagagattcaacttcttcctggtttagacttgggagggtgtatgtgtccaggaatttatccatttcttctacattttctagtttatttgcatagaggtgtttctagtattctctgatggtagtttgtatttctgtgggattggtggtgatagcccccctttatcattttttattgcatctatttgattcttctctctttttttctttatttgtcgcaatgctagtggtctatcaattttgttaatcttttcaaaaaaccagctcctggatttattgatttcttgaagtgtttttttgtgtctctaactctttcagttcttctctgatcttagttatttcttgccttctgctagcttttgaatttgtttgctcttgcttctctagttactttaattgtgatgttagggtgttgattttagaccttccctgctttctcttgtgggcatttagtgctataaatttccctctatgcactgcttaaaatgtgtcccagagattctggtacgctgtgtctttgttctgattggtttcaaagaacatctttatttctgccttcattttgttatttacctagtagtcattcaggagcaggttgttcagtttccatgtagttgagcggttttgagtgagtttcttaatcttgaattctaatttggttgcactgtggtctgagagacagtttgttgtgatttctgttcttttacatttgctgaggagtactttacttccaattatgtggtcaattttagaataagtgcgatgtggtgctgagaagaatgtatattgttgatttgggtggagagttttgtagatgtctattaggtctgcttggtgcagagctgagttcaagtcctggatatccttgttaaccctctgtctcgttgacctgtctaatattgacagtggggtgttaaagtctcccattattattgtgtgggagtctaagtctctttgcaggtctctaaggacttgctttatgaatctgggtgctcccgtattgggtgcatatatatttaagatagttagctcttcttgttgaattgatccctttaccattatgtaatggccttgtctcttttgatctttgttggtttaaagtctgttttatcagagactagaattgtgacccctgctttttttttgctttccatttgcttagtagatcggcctccatccctttattttgagcctatgtgtgtctgtgcacatgagatgggtctcctgattatagcacactgatgggtcttaactctttatccaatttgccagtctgcatcttttaattggggcatttagcccatttacatttaaggttaatattgtgtgtgaatttgatcctgtcattatgatgttagctggttattttgcccattaattgatgcagtttcttcatagccttcatggtctgtacaatttggcatgtttttgcagtggctggtacagattgtttccttctacgtttagtgcttccttcagggcccttgtaagacaggcctggtggtgacaaaatctctcagcatttcttgtctgtaaaggattttatttctccttcacttatgaagcttagtttggctggatatgagattctggattgaaaattcttttctttaagaatgttgattattggctcccactctcttctggcttgcagggtttctgcctagagatctgctgttagtctgatgggcttccctttgtgggtaacctgacccttctctctgggtgcccttaacattttttccttcatttcaactttagtgaatctaacaatttgtgtcttggggttgctcttctcgaggagtgtctttgtgatgttctcgtatttcctgaatttgaatgttggcctgccttgctaggttgcagaaattctcctggataacatcctaaagagtgttttccaacttggttccattcttctcatcactttcaggtacaccaatcaaatgtagctttggttttttcacatagtcccgtatttcttggaggctttgttcatttctttttactcttttttctctaaccttgtcttttcactttatttcattaatttgatcttcaatcactgataccctttcttccacttgatgcattggctattgaagcttgtgcatgcatcacgaagttctcgtgccatggttttcagctccatcaggtcatttaaggtcttctctacactgtttattctggttagccattcatctgactttttcttatggtttttagcttccttgcaatgggttcaaacatcctcctttagctcggagaagtttgttattatagaccttctgaagcctacttctgtcaactcatcaaagtcattctctgtccagctttgttccattgctgccgaggagctgcgatcatttggaggagaagaggcactctggtttttagaattttaagcttttctgctctggtttctccccatctttgtggttttatctacctttggtctttgatgttggtgacctacagatggggttttggtgtagatgtcctttttgttgacgttgatgctattcctttctgtttgttagttttccttctaatagtcaggtccctcagctgcaggtctgttggagtttgctggaggtccattctagaccctgtttgcctgggtgtcaccagcagaggctgcagaatagcaaatattgctgcctgatccttcctctggaagcttcgtcccagaggggcacttggccatatgaggtgtctgtcggcccctactgggaagtgactcccagttaggctacacaggggtcagggacccacttgaggaggtagtctgtctgttctcagagctcaaacaccatgctgggagaaccactgctctcttcagagctgtcagacggggacgtttaggtctgcaggagttgtctgttgccttttgtttagatatgccctgcccacagtggtggtgactatagaggcctaggccttgctgagctgcgatgggctctgcctaatttgagcttcccagccactttgtttacctactgaagcctcagcaatgatggacacccctccccccgccaggctgccacctcgcatttcgatctcagactgctgcactagcagtgagcaaggctccgtgggtgtgggacccgccaagccaggcccgggagagaatctctttgtctgccagttgctaagaccttgggaaaagcacagtatttgggtgggagtgtcctgattttccaggtaccatctgtcacggcttcccttggctagtaaagggaaatcccccaaccccttgcccttcccaggtgaggcgacaccccaccctgcttccgctcaccctccatgggttgcacccactgtccaaccagtcccagtgagatgaaccaggtaccacagttggaaatgcagaaatcacccaatcttctgcattgatcacgctgggagctgcagaccagagctgttcctattcggccatcttggagccgcctcctccatgagtatttcttatcaacctgagccttatcttacatgatcatactacagttatcaactttgttaaatttaaccttgatcaaacatacttttatctattctatcatgagtattaaattttatcacttcacccaataatgttctttttcttttatgaaattcaaattttggaagaatacagccaaccttttctttgaactgaatagtcttcaattggggtttatctgagattttcttaagattagatataagttatgtattctcaatgggaatagcatgtagatgatgctgtgtccttctcaggatatcatatatggaggcacacaatgtctatccatgttatctttctctgtctcagtttctccatttgaataacataaacaataatttattccatagagggatagtgttggcatgatgcaggggcatgatttgggcagggaacccatccaagcaagacaaaggtgaaagcttttacaggctcacacttccagccccaggaccctgacccccacctacctttgaagatgttggagttggaggtgctgaaacctatttgactggtggctcttcttccttgcctctaggaaccatggagcccctgcacagtgagtaggtggtgagcaaaaccagtcaattatgcagatcttagtcatgcttctggttgtggcagatctgtaagttctgtcccaaaccataagttgggtacatatagaacattgtccctgaattcctattcaaggagtactttcttctttttgctgcaggcaatatagatagagacagaacactgtggacctgcagaatcctctgctcccctaacacacacacaagtctggctgattgtggacactcagacacaagtctgggtgattgtggagtggaaggaggatctacatatctattttttttctaacattgtgtgaggaccttcataaagtctcatccatctttatattaatttctccattgctagcatcagcctaacaccaccttatcagcaatctcttgtgacttttgtgaggaaaagagagatctcttccaagagggcttcgaaaatatcacataacatgtagattttaaatatatagacttaaactatactcaaatcctacatcccacttactctaggaaagtcactaatcatctctgtgcctcaatttcctcatttttaaagtgagaatagcagtactttcttcataggatttttgggaggattccatgagttattttgtgttaaacactgagacccaatgtctggcatataagcagtgctatgtatggtttgctaaataaaccaataaaacacttattgaagtgttcagaatcacccagttggacaccaaattcactatgagtcaaatatttaacatgtattaaccaatactctcagtgacccagtgagtttagtgctaaatatttatattttgccaatgcagaaactgaagcatcgaggagctaagcaacttgcccaaggccacacagccaataagtggtagaaacaagatttgaaaggaagtgaattcagagccaggtatgccagatggtgaagcccacagcttttcctgggcctcagagccacgatacatcttgggcttattcccatcaccaaggcactctctctagatacccttacagtgctagcagaggggcataatgggaagggaaatttcaggagctgagctgactgtgagaggctctgagtaagtcttgactgggtctaggaatattcccagagttgtttggttgggatgagaaagtgggaaagtgggagagaagcaaagcctgtagattgtcctaacattttcttctctagttctatttccttgcctcttcccactttacaatatactcttggccttgtcctattcctgggacccctcatcaatttatatcatttacttctctccgtaggaaaaaaaaaagaaaaagatttcttttcaagatgtcattttttgctcttgtactaataaaagagcaactcatgcttagtgcataaattttgtaaaaatatgaaaatgacaattaaatttaaaaataattgttaatcttgtcaacctatgctaacatttgtgcatatattctagtagactttttcttatgtacatatatatttttatatagtggataatcctgtgactatttttaagtttaacatttacaataaatattttcctgtactcctaaatattttcaaaaatttcatagattggtagattactctgccaattaatcaccagttgttgacaagcttggtggtttcagtttttccctattgtagaaattcactattagttacataatgataactaaatccttgagtatttatttatttattccttgggaaagccaataaaagtagaaatacagataattcaatctgtgcataaatattaccaattctctcttcataatgtttaggctatacttgcaccaacaaagaaatggtctgaaaatgtcagaccatttccttcatcttgaccctgatatagacattcagaggattcagatggtaggtcggaggagccagcaggctattgactattcacagttgtctagtgtcacaatcacaggccttacactcatccgatgtaaacttaaaacccatctttacagaggcagatactaaaaaattaaaattaaaattaaaaaaccatctttatcatttgctaactccatgaccttgggtaactcatttcacttctggaaaactccattaaatcacatggaaaaattatagcacaggcatacctcatagatattacagattcagttccaggccaccctaataaagtgagtcaaacaaatattttggtttctcagtgcatataaaagatatgtttacactatactgtgatctactaagtgtgtgacagcattatgtataaaaacagtgtacatatcttaatccaaaaatagtttattgatagacatcaataccaagagctctcaaaaccacacacttacatgtgcttgttagtacatgctcctgttcctgaatgactttttggtaaacaacaaaattaagacagaaatcaagaagttttttgaaactaataagaacaaagatacaacataccaaaatctctgggacacaattaaaccagtgttgagaggaaagtttatagcactaaatgcccacatcaaaaagttagaaatatctccaattaacctaacatcacacctagaggaacttgaaaaacaagagcaaaccaaccccaaagctagtagaagaaaagaaataaccaaaattagagctgaactgaacaaaatggagataagggaaaccatacaaaagatccatgaaaccaaaagttggttctttgtagaataaataagactggtagaccactagttagactactaaagaaagagaaaatccagataaacacaatcaaaaataacaaaggggatattaccactgaccccataaaaatacaaacaaaaatcagagactattacaaacaccactatgcacacaaactagaaaacctacacaaaattgataacctcttggaatcatacaaactcccaagattaaaccaggatgaaattgaacagaccaataacaagtaccaaaatttaatcagtaattaaaaaaaaacttaccaaccagaaaaggccctggaccagatggattcacagccaaattctaccagacatataaagaagagctggtgccaatcctactgaaattattccaaaaacttgaggaggagggactcctccctaattcattctatgaagtcagcatcattctgacatcaaaacctggcagagagacaacagaaaaagaaaacttcagaccaatatcactgatgaacatagatgcaaaaatcctaaacaaaatactagcaaaccaaatccagcagtatatcaaaaagctaatccaccacattgtttcctgttgggagctccctgcaatacccaccccccctcccccctgccccgcaaaaaaatgaattcaccacaatcaagtaggctttatccctgggaagcaagattgattcaacatatgcaaatcaatacatgtgattcatcacataaaccaaactttaaaaaaagatcatcttaatagatgcagaagaggcttttgataaaatttaacatcttttcatgttaaaaaccctcaacaaaccagacatcaaaggtacataccacaaaatagtaacagtcaactctgacaatcccacagccaacatcataatgaattgacaaaagctggaagcgttcctcttgagaagcggaacaagacaaggatgcccactcttgccactcctactcaatatagtattgaagtcctagccagagcaatcatgcatgagaaagaaataaaagtcatctaaataggaagagaggaagtcaaactatgtttgacagacaatattcacagacaatataagcctagaaaaccctgtagtctctgcccaaagcttctagatctgataaaccacttcagcaaaggttcaagatacaaaatcaatgtacaaaaatcagcatttctagcagcatttcaatcgtatgaaatgcatagaaatatgtccaagctgagagtcaaatcaagaatgcaatcccactcacaatagccacaataagaataaaatacctaggaatacagctaaacagggaggtgaaagagctttacaatgagaattataaaacactgtatcagagacaacacaaacaaacagaaaaacattctatgctcatggataggaagggtcaatattgttaaaatagtcatactgcccaaaacaatttacggattcaatgttattcctatatacaaactaccaacatttttcacagaatcagaaaaagccatttgaaaatgcatttggaagcaaaaagggcctggatagccaaaacaattctaagcaaaaagaccaaagctggaggcattatacttccagacttcaaactatactacaagcctacagtaaccaaaacagcatggtactggtacaaaatgagaatcattaacaaatgaaacagaatagagaacccagaaataaagctacacacctacaactgtctgatcttcaatgaagctgacaaaaacaatcaatgggaaaaggacttcctattcaataaatgctactggcataactggctaaccatatgcagaagaatgaaactggacccccactttttaccacatacaaaaatcaatacaagatggattaaagacttaaatgtaaaatctaaagctataaagaccctagaagaaaatctagaaaataccattctggacattggcccaggcaaagacttcatgataaaaactctacaagcaattgcaaccaaaacaaaaattgacaagtgggacctaattaaactaaagagcttctacactggaaaagaaactatcaacagagtaaaagacaacctacagaatgggaacaaatatttgcaaactatgcatccaacaaagatctaatatccagaatctataaagaacttaaatcaacaagcaaaaaacaaaaaaaaattttaatgggtaaaggacatgaacagacccttctcaaaagaagacataatgtggccaaaaagcatatgataaaaatgctcagtatcactaatcattagggaaatgcaattcaaaaccacaatgagatattatctcacaccagtcagaatggctggtgagggagaaaagggaatgcttgtgcagagctggtggtgtaaattatttcagccactgtgaaaagcagtctggagatttctcagagaacttaaaatagaactaccatttgacccagcaattccattactaagtatatatccaagagaatagaaattgttctaccataaagacatatgcctgcgtatgttcatcacagcactgttcacaatagcaaagacatggaatcaacctagggtgcccatcaatggtggactcgataaagaacatgtggtatgtatacaccatgaaatactacctatttttaaaaatgagatcatggcctttgcagcaacatggatggagctggaggccattatcctaagcaaattaagcaggaacagaaaaccaaataccacacattctcacataagtgtgagctaaccattgagtacacacgggcacaaagaagggaacactagacactgggacctattttagggtggaagttggtatgagagtcggattgaaaaactacctatcatggattatgcttattacctggatggcaaaattatctgtacaccaaactcccacaacacacaatttatccatctaacaaacctgcacatgtactccttgaacctaaaagttggcaaggcaaaaaaaaagaagaaaaatactttattgctcaaaatgttaacatcatctgaaccttcagcaagtcaaaatcttcttgttagtggaaggccttgcctcagtgttgatggctgctgactcatcagggtggtggctgctgaaagttagggtagctgcagaaatttcttaaaataagacaatgaagtttgccacattgattgattgcccttcacaaacaattgtgcagtagcatgcaatgttgtttgatagcattttgcccacagtagaacttctttcaaaattagagtcaatcctctcaaatcctctcataaggatttgataaagttgataaagttgataaagttgatagctttatcaactaagtttatgtgacattctaaatcatttgttgtcatttcaacaattcattttcttcctcagcatgcttactaggagaagtttccatctcaataaaccacattctttgctcatccattcaggttttatcatgagattccaggaattcaatcacatctttgggctcaactttagttctcttgttatttccaccacagctgaggttacttactccactgaggtcttacacccttaaaagtgattcatgagagttggaatcaatttctccaaaacttcttttagtgttgatattttgacctcctcctgccaatcatgaatgttcatctagaatggtgaattatttccagaaggttttcaacttactttgccaagatccatcagcgaaatcactatctatggcatctatggccttataaaatgtattttttaaacaataagacttgaaagtcaaaattgtcccttgctctaggagctgaagaatggatgttgtgttagcgagcatgaaaacaacactaatcttgtacatctccatcagagctcatgaatgaccaggcacattgtcaacgtgcagtaatattttgaaaggcaacttcttttctgagcagtaggtctcgaacacggatttaatataaatcatcatgtaaatagatgtgctatcatccaggcttggttgtttcatttatagagtgcaggcagaatatattttgtacaattctgaagggcctgcggattttcagaatggtagatgagcattggcttcaacttaaggtcaccagctgcaccagcccctaacaaaagagctgtcctgtgctctctagctatgaagtcctagatggcatcttcttccaacagaaggctgcttcctccacattgaacatctgttgtttagcgtagacaccttcatcgcttatcttaactagatcttctgggtaacttgctgcagtttctacatcattgcttgctgcttcaccttgctcttttattttatggggatggcttctttcttaacctcatgaaccaaccactgctaacttttcttctgcagcttcctcacctctcagcctcaatagaattgaagagggttatagtctttctctggattaggctttatcttaagagaatattgtggatggtttgacgttctattcagaccactaaaactttcttcatatcagcaaaaggctgtttttcctcttatcattcatgtgttcactggagtcgcccttttgatttcattcaagaactttttctttgcattcccaacttggctaactgatgcaagtgacctagttttcagcctgtctcagctttcgacatgccttcctcactaagctttatcattcctagcttttgatttaaagtgagagatgtgtgactcttcctttcatttgaacacttggagaccattgcggggttattaattggtctaatttcaatattgttgtgtctcagagaatacgaaggcccaagaagagggagagggatagggaaagagctggtcagtgaagcagtcagaacacacatatttatcaattaagctcatcatcttataagggcacagtgcccccaaacaattacaatcaaggatcactgatcataggtcataataacagatacaataatcatgaaaatgtttgaaatattatgaaaattaccaaaatgtgacacagagccactaaatgatcacatgcttttcaaataatgacactgaaggctgggcgccgtggctcatgcctgtgatcccagcgctttgggaggccgaggcgggcggatcatgaggtcaggagatcgagaccatcctggctaacacggttaaaccccatctctactaaaaatacaaaaatttagccgggtgtggtagcgagcacctgtagtcccagctactcaggaggctgaggcaagagaatggcatgaacccgggaggcggagcttgcagtgagacgagattgtgccactgcactccagcctgggcgacagagcaagactccgtctaaaaaaaataaaaaataaaaaaaaatagcactgataaacttgttcaagtcagggttgccacaaatcttcaatttgcacctgcaatatctaagaggcacaataaaatgaggtatgcctgtaataatagagtatatctcattgcctaatattataattaagtgagctaaatgatgtggttttttaacatcgtctcaagtagatttattgtcagtaattaatggtaatagtacacaaagtggagaacaaaggaaccgtgcaattaaaactttaatttttagtaaattttaaaatttactaaacttttgagtaattttgtgttgtaccaactttttttgccagtgtgttcaatccaattccttctttaaattttatttttaattgacaaataataatggtatatatttatgaggtacaaggtgatgttttgacatgtttacattgtgaattattaaatcaagctaattaacaaatctatcacctgacatagttatcttttgtaatgtggtaaaaatatttaaaatctactcttttagtaattttaaaatacataatgtgttactatttatcataatcaccattctgtgaaatagacccctaaagtttatttcttctgtctaatcaaaactttgtatcctttcatcaacagattccctttcctggttcaccccctcctccagcttctggtaactaccattccactctctacttctgtgagttggactttaattttagagtccacatataagtgaggttatgcattatttgcctttctgtgccaggcttatttcacttatcataatgttctccaggttcatccatgttgtgacaaataacagaatttccttttttaaggctaaatagtagtccactgtttatatataccacattttaatccatttatctgatgatgaatacctaggttgattccatatcttggctattgtgaataatgctacagtgaacattggagtgcagatatgttttgacatgctgacttcaatgtctttggacatatactcagaagtgggattgctggaacatatgataattctagttttcattttctgaggaccctccatgctgttttccaaaatggctgaaccaatctacattcccaccaacagtgtgcaaggattcccttttctccacatacttgccaacatttatctttcatactgttgataatagccaatctaccaggcgtgaagtaatatttcattgtggtttttattcgcatttctctgatgattaaaaatgttgatctgagctttgtcagcaacaagtaaaaataaataaataagaaatgttgagcattttttcatatatctgttggacatttgtatgtcttcttttgagaaatgtctactcaggtcctctgcccattttttaaatagggttgttttcttgttttgagtagtttgagtttcttacatattttggatattggctccttatctgatttatcatccaaatagtttctcccaatatgtgggttatgtcttcactgtgttgtttcctttgctgggcagaaggcttttagtttaatacaatattattcccctatttttgcttttgttgcttgtgctttgggagatcatatccaataaatcactgccaagaccaatgtcatgaagctttcccactatgttttcttctagtagtttttacggtttcatgtcttacatttaagtctatgattcattttgagttcattctagtataagaggtaagataagggtccactttcattcttctgcatatagatatagttttgcccacaccaattattgaaggtactgtcctttccccattgtgtgttctttgggcccttgttgaaaatcaattgaccataaacgtatgggcttatttctgaaatctctaacctattccatcagttgctgtgtctgtttttatgccaatagcatgctgtttttattactatacctttgtaatacattttgaaatccagcagtgtgatacctctatctttttctttttggtaaatttgtctttggctattctgggtttccagtggttccatgtgaagcttcagattatttctttctgtttctgtgaagaatgacattagaatgttaatatggattgcattgaatctgtacatcactttggatagtatggacattttgccaattttgattcttccagtccgtgaacataggatagctgtctgtaagttcttctagtaaaaacacactttactgacaaactggatttctctggttgtttttttggtttcttggctccttcagcatttgggggacactttgcacatatggccctcacatgaaacagtccttttagcattttttataagacaagcttagtgttggtgaattctctcagcttttgcttgtttgggaaagtctctaatctctccttcatgtttgaagggtagatttttgagggttagcaggtttttccttcagcactttgaatataacatctcactgtcatctggtcatcagggtttctatgaaagccatattgaggcttcatctaatgtaatatgtttcttttttcttgctactttgagtattctttctgtctttgatttttgataattttattattatatgccttgtggatttcctgtttgggttgaatttcattggtgacttctgagcttcctgcacctggatgctgtcatctttctccagatttgggaaattttcagccattatttctttaaatatgctttgtgggccctttctctcttgtcttctctaggaattctaattatgcagaggttaatttgcctgatgatgtcccatagttcttgtagaccttcttcattcttttttttctctttttgttcctctgattggtgatttcaaatgttctgtcttcaagcttgctaattcctctgtttgctcaagtctgctgttgaagctttataatgagtttttcagttcaattattttattctttattactagtatttctatttctattgcttggttttttttttcattgtttctataaatcttcaattcttctgggaccattcctggagctttgttgatttcttttgatggtattgaatatttctgagttttcacaagccttgtatctttacatggatgcctgcatatttgaggcgactgccaactcttccagcttttgcaggtgctctttcatggtgttagacctttacttcttagtattagaacttaaacactggcctgttgttgctttacactgtagagagggcttaatagtgagcatcagaactaaaacattgcactggacctaactcattgccctgtcattgtttcccagtgtaaggaaaacttatagtgagcaccacagcttaaatgccctggaacaatattgctgccctactattgtttctcagtgtgggaaaaacttaggtgggtactgaaaatcttgaccttttagttgtttctgggccagggaaaagcttcacatgtgcacctgggctttgtggatttgggccttcccataaattttgtcccctacaatactctggcccccccaccagtctcttcaatatggcatccccactgatcaaagcactgaacaatcaccaagatccacatgccagttgctgcaatcagtgacctactctttgtccccaattcaccccaggtttttcagccctcttggttctctagtgggatgaaactggagtggacttaccattaagattcctagacaagtgggaagatcaaatatccacctccaattccttcttctcatctcagcaactgtgggtctagggaagttctctgtgagtggtattattatggcctgggagagagggtggaacaggctgaaatgaccatttctcttacctgtcactgcttctctcaattctatgagcccagggggtttctctgcttctcaagttctggtgtattcagggtggcattcttgtctttgaatagtttttcattttatttttgtgtcaggaagtgatcccaggagatctattctgccatcttgctgacatcacttcccagtttagtcctgaggtatcagggatggattaagaagcacatggctttccccatcctgggaaaattctccaggacagggcaaaccagctcttgcaccagagacatatccacagagtagcctttcttgtattgtcactctctgcagctcatatccttgtgctgggctgtgaggcaggcactaaggacactctttaggtaacagtggaacgcagaacaaagagaagtcaagctagcctcagagaagagaaaatttgtcttaagtttttgatatcacaatctgcatctttttataatttgtatcccttgacaaattattgtaggtttcattgtttttaatagctttgccttttaatgttattaaagatataatttatttacccactgacattacagtatcagagtattttggatttcacaatgtatttacttttatcagtgaatgttatactttcatatgttttccagtcactaattagtgtcctcttcttcagcttgaagaactctctttagcacttcttgtaaggcaagtctagtagtaataaactctctcagcttctgtttgtctgagaaagtctttatcaccccttcatttttgaaagaaaagatttctgggtatagtattcttggttgacagggttgttttattcaggatttttaatataacatcccacccccttctggcctacaaagtttctgctgagaaatctgctgataatctaagggagggttctcttgtgtgtagcaattcactatttcctcactgtttttaaaactttctctgtctttttgcatgtatggcagggggagggtggtgagtattctggtttcttccatcctatggtgaaggtgaatgccagtatttatctctccctctctctgcactaagctggagagataatctgtgacaaatgcctatacttgtgtccaaactgcaccctctgatcctggtgagatagctgcttgatatggttagaatctgtgtccccatccaaatctcatgtcaagttgtaatccccaatgttggcggtggacctggtgagaggtgattggatcacgggggtaaatccttcatgaatggtttaacatcatctctttggtgctgttctcatgatagtgagtgagatgtggttgtttaaaagtatatagtacatccctcaccccgctcctcctccagccatgtgaagatgcctgctctggctttgtcttctgccatgagtaaaagctcctgaggcctcctcagaagcagatagtgccatgcttcctgtatagcccatagaaccatgagccaattaaacctcttttctttataaattatgcaatcttgagtatttatttatagcaatgagagaatggactaatacatgctgaaagtgggcccgttgtatgcccatgtctttgttttctgtagtcccaggccgcttaggaatgcaaagtctcattgggaatgcaaagccccattagtccccagagctaggttgataaggagacagtcccttgggtggaaactatagaagcttaggtactcagtacacggacaaactccttccaggaagaatgggtcgactggatttatcactgggatgagccaaaggaaaggctcagaaagtgctcagctcaagctcaggatgacagggagctactttctccccttaggtcctcaatgcaaattcattaaaagcaaggtcatcaagtagccaccaatagagtaagcaggaaaccccttgcaaagagaaaatgggagctcagcattctagtcccttttctacactgctcccaggagatgtagaccctggcagtgttattatgtccatttaaaaccacctttttggctgggtgcaatggctcagcctgtaatcccagtactttgggaggctgaagtgggtgggtcacttgaggtcaggagttcaagaccagcctggccaacatggtgaaacgctgtctccactaaaaatacagaacattagccagatgtggtggtgcatgcctgtagtcccagctacttgggaggctgagacaggagaaccgcttgaacccgggaggtggaggttgcagtgagccaagattatgccattgcactccagtctgggtggcagagtgagactctgtttaaaaaacaaacaaacaaacaaaaaaacctttttgtatgtgatctgggaagacttgagtatgcatagtttcaggtggtagctgctgtaaaagttgggccactcaatgcatggcataaaccccttacagggagtaacagggagctgcatttttaagccccttttctgtaccactccaagagtttgaaacccccagaaatacgtgtgcacctgtataaacctaccactcttgtctgttgtctagagagattctcatatgcatagtcctctctgctcctaaagctgggagttttagagtgcagtccttccagtagaagctgcaaaagttgaggcattctacatgtggacaaactctctccaggaaggagtaatagacctggagttatcactggagtgagccaggggaaaaggcttaggaagtgttgatctgcttctgaggctaccagcaggctactatttgcctctttaactccccaatgcaagttaattaatgcaagttaattagaagcccagccaccaagtagcccctagaagagtgtcataaacccctcccagagaaaaacaagaagctgcatttttttaagtccttctctgcactgcctccagagagtgaggcccctggaagtgcttgttctgtagcataaaaccactgcttttttcctgtaggtcagaaagactcatgtattcctaatcccctccacttccagagttgattaattgagccgaaccacggggaatttcagagctaaagcactatatgtgaggcccaaaccctcctctccacagagagaagttgtgtgttagggattcctttcctggttgtatggcacagtgtccaaggtggagttcatgcctgagtgcacctcagcttttcccactcatttgatgcagatgttttttctcagttgcccagtgggtaggagtctctcaattggttcctgacttttttcagagaatcaatcagtgaatagtttgttcagtgcattggtgggtgaagggagagtcaggagtctcctatttcaccatgttgctgatgtcatctaagggtaagcctttaggcttggcaacaatgacttctggataggagacttcccttgaatctttcacagcatgaacattctatttttgtgccaacatgcatttcacggtgaaagaagtcacaacaggggcctcagacaccaaacgcaaccttagatttcaaataacgtcctgtagttcatgaattaggtatcctgagtttggaataatgcagactgctaacagaggtaggggagggacaaacattgctggtgacgacattggtatagaaccacctgtgagcatcaaatgcagccaaagtacagaaacaaggtaggggtggatcagtgtcatgttgcatacatgagatggcagtatccttctagagtctccccatttacattcacttcgaaaagcagcatggcctaggagatagaaaaagaacaaacaatgcaaaagcaatggcaaccataagactatgtgtttgctctcaaacacaacaggcctcatctgtgattcttttcaggctagaacttgacattttggagatccagattttggaagaatttgcctttgcttcttcctctgcctccaagacgtccatgttcttctaagggtcctcactaccttactctacataatatgagagcacatagatgttttcatagaagagagagcacacagtcataaccaaatgggcactcctttcagctttgagttccctggggcactgtgagctgtccagagagctctctggaacacaggtcagggcaccagtgattagaagaaagcagagcaactgcttccagtaaaattcatagtctatgatgctcatgccagtgacatggaataggtcaacctgacacccatggcatgtccacatggtacagtgcactgaacttgaatgggggaggttattctctatatggtccctgaaaggtaaatttgcctctcttaatagtgtctcctagcagtgtttggagatggcctgagatgacgcttgctaagggaggctatctgaggaagcaccaaataagatctcttagagaccatgcccttatagcccacctactgctgatgatgtctgtgttggtagttgattatgatctcttttctaagactcccttgtccaagaaaagctcttgagaaaggtgaagacaaatctgagatatccagagcctggtgtgatgcctcagaggtggctcatggcctctggtctgatgggggaagttttcttctctgatgtctctttcattgaatagcccagcaagaagcactagactggagcataacactgcacacctgcctctgggcatggcctgtcctcctgaaacctcttcacatttgactccgtgttccaattagccacatgtgatgcaaccctggatctggccccaggatcatttcagaggagttgcgattgcatagagtaagggagagtctgtaccacagtggttaatttccactaactcacagtaggatgacaggcaagacccactgccactctgtgccaattactccttagcaatagcagcatgaaccacctgttccccaccccttggtgttcctcttgatcaaaagaaaagagaataagcctctaaggaagagggcttgggaaagatagggactattcagttaatggaaggtgctggagtgttagatcctgagacccaaattgggtcccatcagaggagtagccatgttggtgggtgctggataggaggagctttggggttggtgcaggcactcactctcactaggatgcctctggtctcaagtaatggagagaagtgagaaaaagtgagctcagaggaaacatcctcttccggccacatcatatcctctctctctcttgtggccttaggcatgtcgctggccttcctgggactcattatcctcattgtaaagagacagcaatctgaagctcagaaagagattggggagcatgaggtgggggagtaccaaggctaaggagaccaaagcagtgcttgggggcctcccactctttaccttgggttctaactgccacccatctcgtgcttaatgggtccttctgactccagggtgagaaatgttctccttagcatcaggagacgctgcacatgagcagttcctccccctgggagtactggttcagtgagcaaaacagcaaggggctgggcatcctgagggctgggagggatacatgggccaaagaaggagaaggagggtagagaagcatagccagggagagaaatcaaacaccaggacacaagatgagtggggcatctttgggggctacagtgggctctcaatgatcacctgtagtggcagcaaaagaggcaggatccatgggcatttgttctggtttatttgacagggacagggagttcagacactggggagggtggcattcctgttgatgttcttgtgctgatgatttgatgtccttgtgcttcggatgtgggcacagtctcggatggaagggttcagggagcaggatgcacatcccagcccactctcccactcataggatgctcatacaaatgttcccacagaaggctgaacagcatatcttatttgtttcacacttttggaaatatgaacagtggtggatgcatagatctatgctgggtcgcttctcacagaccttgattcctgaaatgatgcaggagcagggtcaatgaaaccatgcacctatagagcagccttctcaagcttgaagctcctccatggccccagaaccaaggcacccctgccaccacgactctcctggactcttcagggaacttccttccagcccatcaccaatcctagtgattggcagtatcttaaatcctgtctccctgccctgcatctcaccccagtagacttcaatgcctgggcttcctggactctcgccatacacctgcattcagaactctgtctccccattaatcatggtgaagtcacccccatagaatctatggtctgaccctgagagctcaaagaagcctgagacatttccaaaccctcccctagtctccagaatttgcagagcccagaaaagaagatgaacttgcctctcatccctccttctcctctcctctccatcactgtccctagtatcgcttcccaccaccactctcctggctcctttgatgttatacttaactttgccctgtatactccaacttttcattgcttatgtcctttttaccctacacttatacccatttctacacctacacctaccctcataaccacttctagatgttcactcctcacaaatgtgcataaatcaaagaataattgtcttgctttcccattggattctcagccctggttcacctttcactatgggatgtaccatttgtctctaagtactgggagcaaacaacaaaagatgtaggttcccccttcattcccactactattcccagggccaggtaaaggggttggagggccatggtttgggacagcccagagtctgcacagcattgtggtcagagctggatatgcagaaaggttgcaagtcctaggtcctactcagactggacacagctcctccattccccctacccaactctccatcacccatccagcagcccatcacctactctgcatcctcatcttgtcacggtatcctccctgggcctgcagcagcagcacacagagaaccaggacaagcagcagagtctggggtgccataactctgaccagagcgtgagccctaagtctggccaggcagtcacagacttccctgcagagctgcctgtggagagggaaggaaataaagaaggaatgatcttcagctcctcgctgcctccactggacaagtcagggcagagcaagagtccttgcttcctgcccttgccttctcctggccctgtccttctccatgtaggatagggcttctgcaggaatgatgcctcctctcacatcacataaccagtcctgtgttcttgctaacagagtttttcttttccaaaaggtactctttatttctgctttctaattataaaatgctttatggaaaaaagaaaagaagaaatataattttttaaaaggtgcttagaattaacccatattttattacattatcttttagttcctctgtatatttaatgtaaacaatcttttattttctcatttttgaatcacctatcttttgttacctaccgtctgccacctttatttagtcatgcaaatatttacaatgtcattatttctcaaaaagaaaagacataatttttttgggggggggcggtgaacgtagctacagatagacactccaatttccacagttgtgaaagcagaaatcatatcatgagcccctttaggaagtggctatttgcatataatggatgtgttcattataaattcttctttttttttttttagacagagtctcactccacaccaggctggagtgcaatggcgtgatcttggctcactgcaacctccaccttccaggttcaagcaattcgcacctcagcctcctgagtagctgggattacaagcatgtgccatcacacccagataattgttgtatttttagtagagatggggttccgccatgttggccaggctggtcttgaactcctgacttcaattgatccacctgtatcaacctcccaaagtcatgggattacaggcgtgagccaccacactcggcctaattataaattattcttatcaattcattacacaaaactctatatgattgagctatatttttaatattaagttctggggtacatgtgcaggatgtgcaggtttgttgcatgtgctgtgggggcttgctgcacctatcaacccatcacctaggtatcaagcccagcatgcattagccatttatcctgatgctctccctcctatgacaggccccaaggtgtgttgtttacctccctgtgtccatgtattctcattgttcagctcccacttataagggagaacatggggtgtttgaacatggggtgtttggttttctgttcctccattagtttgctgaggataacggcttgtagttccatccatgtccttgcaaagaacatgatctcattcctttttatgccacatagtattccatggtgtatatgtaccatattttctttatccaatctatcattgatgggcttttgggttaatttcatgtctttgctattgtgaatagtgctgcaatgaacatatgcatgcatgtgtctttataacagaatgattccattcctttgggtatatacccagtaatggggttgctgggtcaaatggtatttctggttctaaatctttgaggaatcatcacattgtcttccacaatggttgaactaatttacattcctaccaacagcatgaaagcgttcctatttctccacaacctcaacagcatctgtagtttcttgactttttaataacctccattgtaactggcgtaagatggtatctcatcgtggttttgatttgcattactctgatgttcagctttttttcatgtttatcggctgcatatatgtcttctcttgagaagtgtctgttcatgtcctttgcccactttttaatgggattgcttgtcttttcttttattattattattattattattattattatactttaagttttagggtacatgtgcacaatgtgcaggttagttacatatgtatacatgtgacatgctggtgcgctgcacccactaactcatcatctagcattaggtatatctcccaatgctatccctcccccctccccccaccccacaacagtccccagagtgtgatgttccccttcctgtgtccatgtgttctcattgttcaattcccacctatgagtgagaatatgcggtgtttggttttttgttcttgcgatagtttactgagaatgatgatttccaacttcatccatgtccctgcaaaggacatgaactcatcattttttatggctgcatagtattccatggtgtatatgtgccacattttcttaatccagtctatcattgttggacatttgggttggttccaagtctttgctattgtgaatactgccgcaataaacatacatgtgcatgtgtctttatagcagcattatttatagtcctttgggtgtatacccagtaatgggatggctgggtcaaatggtatttctagttctagatccctgaggaatcgccactcccaccaacagtgtaaaagtgttcctatttctccacatcctctccagcacctgttgtttcttgactttttaattattgccattctaactggtgtgagatgatatcccattgtggttttgatttgcatttctctgatggccagtgatggtgagcattttttcatgtgttttttggctgcataaatgtcttcttttgagaagtgtctgttcatgtccttcgcccactttttgatggggttgtttgttttttccttgtaaatttgttagagttcattgtagattctggatattagccctttgtcagatgagtaggttgcgaaaattttctcccattttatgggttgcctgttctctgatggtagtttcttttgctatgcagaagctctttagtttaattagatcccatttgtcaattttggcttttgtttccattgcttttggtgttttagacatgaagtccttgcccatgcctatgtcctgaatggtaatgcctaggttttcttctagggtttttatggttttaggtataacgtttaagtctttaatccatcttgaattaatttttgtataaggtgtaaggaagggatccagtttcagctttctacatatggctagccagttttcccagcaccatttattaaatagggaatcctttccccattgcttgtttttctcaggtttgtcaaagatcagatagttgtagatatgtggcgttatttctgagggctctgttctgttccattgatctatatctctgttttggtaccagtaccatgctgttttggttactgtagccttggagtatagtctgaagtcaggtagtgtgatgcctccagctttgttcttttggcttaggattgacttggcgatgtgggctcttttttggttccatatgaactttaaagtagttttttccaattctgtgaagaaagtcattggtagcttgatggggatggcattgaatctataaattaccttgggcagtatggccattttcatgatattgattcttcctagccatgagcatggaatgttcttccatttgtttgtatcctcttttatttcattgagcagtggtttgtagttctccttgaagaggtccttcacgtcccttttaagttggattcctaggtattttattctctttgaagcaaatgtgaatgggagttcactcatgatttggctctctgtttgtctgttattggtgtataagaatgcttgtgatttttgaacattgattttctatcctgagactttgctgaagttgcttatcaacttaaggagattttgggctgagacaatggggttttctagatatgcaatcatgtcatctgcaaacagggacaatttgacttcctcttttcctaattgaatacactttatttccttctcctgcctaattgcccaggccagaacttccaacactatgttgaataggagtggtgagagagggcatccctgtcttgtgccagttttcaaagggaatgcttccagtttttgcccattcagtatgatgttggctgtgggtttgtcatagatagctcttattattttgagatacgtcccatcaatacctaatttattgagagtttttagcatgaaggttgttgaattttgtcaaaggccttttctgcatctattgagataatcaggtggttttgtctttggttctgtttatatgctggattacatttattgatttgcgtatattgaaccagccttgcatcccagggatgaagcccacttgatcatggtggataagctttttgatgtgctgctggattcggtttgctagtattttattgaggatttttgcatcaatgttcatcaaggatattggtctaaaattctcttttttggttgtgtctctgcccggctttggtatcaggatgatgctggtctcataaaatgagttagggaggattccctctttttctattggttggaatagtttcagaaggaatggtaccagttcctccttgtacctctggtagaattcggctgtgaatccatctggtcctggactctttttggttggtaagctattgattattgccacaatttcagctcctgttattggtctattcagagattcaacttcttcctggtttagtcttgggagagtgtacgtgtcgaggaatttatccatttcttctagattttctagtttattttcgtagaggtgtttgtagtattatctgatggtagtttgtatttctgtgggatcggtggtgatacccctttatcattttttattgcatctatttgattcttctctctttttttattagtcttgctagtggtctatcaattttgttgatcctttcaaaaaaccagctcctagattcattaaatttttgaagggttttttgtgtctctatttccttcagttctgctccgattttagttatttcttgctttctgctagcttttgaatgtgtttgctcttgcttttctagttcttttaattgtgatgttagggtgtcaattttggatctttcctgctttctcttgtgggcatttagtgtcataaatttccctctacacactgctttgaatgtgtcccagaggttctagtatgttgtgtctttgttctgattggtttcaaagaacatctttatttctgccttcatttcgttatgtacccagtagtcattcaggagcaggttgttcagtttccatgtagttgagcggttttgagtgagtttcttaatgctgagttctagtttgattgcactgtgatctgagagatagtttgttataatttctgttcttttacatttgctaaggagagctttacctccaactatgtggtcaattttggaataggtgtgttgtggtgctgaaaaaaaatgtatattctgttgatttggggtggagagttctgtagatgtctattaggtccgcttggtgcagagctgagttcaattcctgggtatccttgttgactttctgtctcgttgatctgtctaatgttgacagtggggtgttaaagtctcccattattaatgtgtgggagtctaagtctctttgtaggtcactcaggacttgctttatgaatctgggtgctcctgtattgggcgcatatatatttaggatagttagctcttcttgttgaattgatccctttaccattatgtaatggccttctttgtctcttttgatctttgttggtttaaagtctgttttatcagagactaggattgcaacccctgcctttttttattttccatttgcttggtagatcttcctccacccttttattttgagcctatgtgtgtctctgcatgtgagatgggtgtcctgaatacaacacactgatgggtcttgactctttatccaatttgccagtctgtgtcttttaattggagcatttagtccattacatttaaagttagtattgttatgtgtgaatttgaacctgtcattatgatgttagctggttattttgcttgttagttgatgcagtttcttcttagtctccatggtctttacattttgacatgattttgcagtggctggtaacggttgttcctttccatgtttagtgcttccttcaggagctcttttagggcaggcctggtggtgacaaaatctctcagtatttgcttgtctataaagtattttatttctccttcacttatgaagcttagtttggctggatatgaaattctgggttgaaactctttcctttaaggatgttgaatattggtccccactctcttctggcttgtagagtttctgccgagagatccactgttagtctgatgggcttccctttgtgggtaacccgacctttctctctggctgcccttaacattttttccttgatttcaactttggtgaatctgacaattatgtgtcttggagttgctcttctcgaggagtatctttgtggcattctctgtatttcctgaatctgaatgttggcctgccttgctagattggggaagttctcctggataataacctgcagagtgttttccaacttggttccattctctctgtcactttcaggtacaccaatcagacgtagatttggtcttttcacatagtcccatatttcttggaggctttgttcatttgtttttattcctttttctctaaacttcccttctcgcttcatttcattcgtcttccatcactgataccctttcttccagttgatcacattggctcctgaggcttctgcattcttcatgtagttctcgagccttggctttcagctccatcagctcctttaagcacttctctgtattggttattctagttatacattcgtctaaatttttttcaaagtttttaacttctttgcctttggtttgaatttcctcctgtagctcgtagtttgatcgtctgaagccttcttctctcaacttgtcaaagtcattctccgtccagctttgttccattgctggtgaggaactgtgttcctttggaggaggagaggtgctgtgcttttcagagtttccagtttttctgctctgttttttccccatctttgtggtcttatctacttttggtcttgatgatggtaatgtagagatgggtttttggtgtggatgtcctttctgtttgttagttttccttctaacagacaggacccttagctgcaggtctgttggagtttgctagaggtccactccagaccctgtttgcctgggtatcagcagcggtgtctgcagaacagtggtttttcgtgaaccgcgaatgctactgtctgatcgttcctctggaagttttgtctcagaggagtacccagctgtgtgaggtgtcagtctgcccctactggggggtgcctcccagttaggctgctcaggagtcaggggtcagggacccacttgaggaggcagtctgcccattctcagatctccagctgcatgctgggagaaccactgctctcttcaaagctgtcagacagggacatgtaagtctgcagaagttactgctgtctttgtttgtctgtgccctgcccccagaggtggagcctacagaggcaggcaggcctccttgagctgtggtgggctccacccagttggagcttcccggctgctttgtttacctaagcaagcctgtgcaatggtgggcgcccctcccccagccttgctgccgccttgctgtttgatctccgactgctgtgctagcaatcagcgagactcggtgggcataggaccctccgagccaggtgtgggatataatctcctggtgcgccgttttttaagcctgtcggaaaagcacagtattggggtaggagtgacccgattttccaggtgccgtctgtcacccctttctttgactaggaaaaggaactccctgaccccttgcgcttcccgagtgaggcaatgcctcgcactgcttcggcttgcgcacggtgcgctgcacccactgacctgcgcccactgtctggcactccctagtgagatgaacccggtacctcagatggaaatgcagaaatcacccgtcctcttcatcgctcacgctaggagctgtagaacggagctgttcctattcagccatcttggctcctcctcctgtttgttttttcttataaatttaagttccttgtagactctggatactagacgtttgtcaggtggatagattgcaaacattttctcccattttgtaggttgtctgttcactctgatgatagtctattttgctgtacagaagctctttagtttaattagatgccatttgtcaatttttgcttttgttgcaattgcttttggtgattttgtcatgaaatctttgccaatgcctatgtcctgaatggtattgcccagattttcttctagagtttttatagtctggagttttacagttaagcctttaatccatcttgagttaatttttgtataaggcataaggaagaggcccagtttcaattttctgcatatggcaaatagtagcaaaaagagctgtgattattatattaaagtcaaacaaaatacacattgtgtcaaatattgttaaaagaaacaaaaaacatgattatatatcgataaaagggtcaattcatcaaaaagatataaaaattataaacatatacacaccaagcaatagagcttcaaaatatatgaagcaaacaccacaggattgaagggagacgaagcactacaaaatagttggagagttcaatatcccaccatggcatcataagaaatatatttggtctttgtccccagttcctggcacaaggttcctaaaactcttggaatttcctgagtgatgggtgtgtcttttgatattcataagaagcccctttcgattccacctcagtttctgctaatgaggttacttggagtggggcccctaggtagcctcaggatggagctggtcaccagaaaggtcaagtgattagaggtctggaaattttagacccacccactctcctccaggaagttaaagaaggaaggagttgaagctctataaaaactcttaaacaataagatttgatgagcttctgaattggtgaacacatccatgtgccaggagggtggcacacacaactcacaaggacagaaattcctgtgcttgggacccttctgaagctcaccctatttacttcatctggctattcatttgtatcctttataataaactgataaaccttaagtaaagtgtttcctgagttctgtgagctgtttcagcaaattatcaaactttcagatgggattgtgggagcccctgatttatagccagtagatcaaaagtgcaggaggcccaagacttgcaactggcacctgaagttgggagtagtcttgtgaaatcaagcctataagctgtggggtctgcactaacttcaagtagttagtgtcagaattaaattaaattttggaacacccagttggtgtccagagataggagaattggttgttggtgttggaaagcattccaggccctctttcaataatgaatagaacatgtagacagaaaaatcaataaggaaatagggtactaaacaacactataaacctaagacagacctaagacaagaagagaatgcatattcttctcaagcacatatggaacatactccaggataaactacatgttaggccacaaaacaagcctaaatacattttaaaagattgaaattatacaaactatcttctccagccacaatggaacaaagctagaaatcaataagagaaggaaaactggaaaattctcaaaaatgtgaaattaatacactctaaaacaaccaatgagtcaaagaataaatcacaacggaaattagaaaataatttgagccaggcatgttgactcatgcctgtaatcccagcactttgggaggctgaggtgggtggatcacttgagcccaggaattcaagaccagcctggcaacataaaaagaccctgtctctacaaaaaactaactaactgggcatggtggtatgcacctgtagtcccaactacttagaaaaaaaactttcggatgaatgaaaatgaaaacacaaaacacaacatccaaaaacttatgagatgcagtaaaagtagttctcagggtagaaaatctataactgtaaatacttacattaaaaaagagcacggccaggcgcagtggctcacgcctgtaatcccagcactttgggaggccgaggcaggcagatcacgaggtcaggagatcgagaccatcctggctaacacagtgaaaccccacctctactaaaaatacaaaaattaactgggcatggtggtatgagccttgtagtcccagctactcaggagtctgaggcaggagaatcgcttgaacccaggaggcagaggttgcagtgagccaagatcgcgccactgcactccagcctaggcgacagagcaagactccgtctcaaaaaaaaaaaaaaaaaaaaagatctcaaatctgcaacctaactttacatcatacgaaactagaaagagaagaacaaatacacccaaagctagcagaaggaaggaaataataaacatgtgagcacagaaaaatggaataggaaatagaaaaccaataaaaagaatcaacaagaccaaagcttggtttttttaaaagatcaataaaattgaaaatctttagctagattgactaagaagaaaagagaaaagacacaaataactaatatcagaaattagagtgggacatcaccaccaaccttacagaactaaaaaaattataagagaatactatgaacaattttacaccaacaaattagataaccttggatgaaatggacaaattcctagaaactcacaaatcaccaaaactgacttgagaaggaatagaaaatattaacagacctataacaaataaagagatagaatcagtaatttttgaaaaatacacatgactctcttcaacaaaaagaatgcctagggctagatgacttcactgataaaatctataccaaacatttttttattaacaccaatccttctcaaagttttccaatcttaactgatacagaaaaagcatttcacaaaattcaccacccttctataattaaaaaaaattcagaaaactaggaaataaaggacttccttaacatgattaaaggtacctataaaaaactatatacaatgatcattatactcaattgcaaaagatcaaaatctttctcccaagatcagaaataagacaaggatgcatctttcaccactgctagtcaacattgtaatggagttctaaccaaagcaatcaagtaataaaaagaaataaaagtcatccaaattgggaagaaagtaaaactatctcagctgtttttgtaaacaccagcaatgagcaatccaaaaaggaaattaaggaaacaatttgatttacaacaggctatgaaaggataaaatacctagaaataaatttaaccatggaggtaaaagacttgtataccacaaaatacagaacattgctgaaagaaattatagaagacctcaagaaatagaaagacatcccatcatttttttttttttttttttttttgagacagcgtctggctctgtcacccaggctggagtgcagtggcatgatcttggctcactgtaacctccatctcccaggtgctgggactataggcgcatgccactacgcccagctaatttttgtattttctgtagagacagggttttgccatgttgcccaggctgatctcgaactcctgagctcaagcaaaccacctgccttggcctctcaaagtgctgagattataggcgtgagccaccacacctagctgacatcctatattctatattggaagacttaaaattattaagacggcattacaatgcaattccaatcaagttccaacaggtatttctttttctttttttttttttttttttgagatggagtctcgttccgtcacccaggctggagtgcagtggcgcgagctcagctcactgcaacctccgcctcccaggttcaagcaattctcctgcttcagcctcccgagtagctgggactaccagagtgtgccaccactcctggctaatttttatatttttagtagagatggggtttcactatgttggccaggctggtctcgaactcctggcctcaggtgatccacccgcctcggcctcccaaagtgctgggattataggtgtgagccaccacacctggccggatttttctttatttgagaaacagaaaacttgatcctcgagttcatacaaaactgccttttcattgttgtactttgtagggtctcccatttcccccattttgtgcgttctgagtgaaaaacagagagtgccttgttggctgtgtgacccagccagttgcatgtttttcccagcaaggctgaaccgaagccaaggctttggatagccaaagcagtcttcaaaaagtagaattcacacttcctgattcaaaaataagccaatgatttaaatataaaagctacagaattcttagaagaaatgtagaagtaaatcttcatgactatggattgggcaatggattcttagaaaagacaccaaaagcacagtaacaaaagaaaaaaaaatcggacttcatcaaagttaaaaatttttgtgcctcaaatgactatcaaaaaagtgaaaagacagcctatggaatgggagaaaatatttgaaaaaatcatctatctggtgagtatccagaatatattaaagaactcttatgactcaagaagaaaaaaaaaaaaaaacccaattacaaaatgggcaaaggacttgaatatacatttcttcaaagaaaatataaaaatgaccaacaagcacatgaaaatatgctcaatatcggctgggcacggtggctcatgcctgtaatcccagcacttcgggaggccaaagcaggtggatcacctgaggtcaggagtccaagaccagcctcgccaacatggtgaaaccctgtctctactaaaaatacaaaaatttgtcaggtgtgggtggcaggcgcctgtaatcccagctactcaggaggctgaggcaggagaatcgcttgaacccaggaggtggaggttgcagtgagctgagatcacaccactgcactccagcctgggcgacagagtgagaatccatctaaaaaaaaaaaaaagaagaaggaggagaaggagggggagggggaagaagaagaagaaagaaatgctcaacatcattagttattagggaaatacaaataaaaaccatgagataccacttcacattttttgactggctataatttctaaaaaggaaaataataagtgctgacaagcatgtggagaaattggaaccctcgtgcatagctgatagaagtattaaattgttcagccgctgtgggaagagtttggagtttcctcaaaaaagtaaacatacaaagttaaacatatgacccagcagttctactcccaaatatttacccaaatgagttaaaaatatatactcaaaaaaatattcatctacaaatgttcatagctgcattatttgcaattgccaaagcaaggaaacagctgaaatgtccatcaacagatgaatggataaacaattgtgatatatatatatacaatggagtattattcacccataaaatggaatgaagtactggtgcatgctacatagtaaatgaacctcaaaaactacagaaataacatttcctacccaattgttttggaaaaaattcaaaagcatgacaacacgttctgttagtgagactgtaggaaacgtgcacagtcacattgttggtggcattacaaaaaggtataatctttatgaagtagaaatcggcaatatctagccaaactatatgtgcatttatcctcttttttctcttttgagacaaagtctagctctgtcacccaggctggagtgcagtggcttgatcttggctcactgcaacctctgcctcccgggttcaagcgattcttctgcctcagcctcctgagtagctgggactacaggcatgtgccaccacgcccatctaatttttgtatttttagtagagatggggtttcaccatgttgaccaggctggtctcgaactcctgacatcatgatctgccctcctcagcctcccaaagtgctgggattacaggcgtgagccaccgcacccagccgtgcatttatccttttaaccaatgatcacacttttagaaatttactgatattatacctccaacaatacagaaaattatgcataattgttcattgcagcattatttataatagcaaaatcttggaaactacctaaatgcccaaatataggagactggctatatgactaaggtgtatgtcaaatgcagctgtaatagaggaaaaattgttatgaactactggagagcagttttcaggatatattgttaaatgaaaacaacaaggtgcaaatgggtatattcgtgcaagaaaaacagagttgagagttcaagtaactaattatcttaaatcaagaatttatagagaattgataaagaagggctgctactcagcacatcctatgaagtcagcataaacttgctatgaaaccaagcaaggacaatatgagaaagacaagttacaggcccagttcattatgaacatagatgtaaaataccttaaaaatagcaaactaaaccaaacaatataaaaatgataatattcaatgatcaccttatattaccatagaaatggcttaatgtttgaaaatctgaatgttcactgcattaacagattaaaggatataaaaatgttatcatctcaatatacatagaaaaaagcaatacatataatctgacataaactaatttaaaatttcttgttaggaatgaaagaaaaatttctaaacctgatagagggtacttatgagaaacctaaagtggagacaattctaaaaggggaaacaagaagttttcattttaaatcaggtatcagacaaaaatacacactatcaccacttacatatgatgtactcaagggcctagcgagcacagtgaggcattaaaaatggcataaagtttgaagaagaaaactataactgcttatttgcctatgataaacactgaagagaacacacaaagaaaccataataaacaatgggagaatttagcaagctaactagttacaaatttgtggaaagaagaaaagatccaagctttaaagagaggaaagcaagtttgaaatagtatttgtagaaagtgggaacactggcttactgaagaaacttagtaagattgccagaccctttttggtttggtgatggtgcatctattgtgctgtttagtagcccagttgagttattttcccccagcaacaattatctgcctaggttcaagcttcaatgaaattgatggttggattcattcagggttgcagtttttgtaggtagattcaagcaaggagatttaaatgacaggttctgagtcctacattgatagaaagaaaagtaaacgcctataggggaggactacgaaatagggaagtgaagagtcaatgtttattggtttcagtgaggtcaaataattgtcatggtggagatttttgagcaaactggaaagttaacttctctacattagcagtaaacaaaaggaattagttgaaaagttatgataacatttacaatttccttttaaaaacttcaagcctcagaccaggcgcggtggctcacacctgtaatcctagcactttgagaggctgaggagggcagatcacctgaggtcaggagttcaagactagcctggataacacagtgaaaccccatctctactaaaaatacaaaaattagctggacatggtggtacacgcctgtaatcccagcaactcaggagtctgagacacaagaattgcttgaacctgggaggaagaggctgcagtgagcagagatcgcaccactgcactccagcctgggtgacagagccagactccatcatctcaaaaaaaaaaaaaaaaaattcaatcctctgtgaataaatataacatgtacaatttccacaggggaaaattataaaaaaatgttaagggacatgaataagatctagatacagatgaaagagatagcaaggtcaagattaggggaataaaggaggatatgaaaacactacgtgaccctggagtgggtgtgattgggaggtgcttggattcctgccctgccggttttgattggagtacacggtgaaaggctagtcacactgggcctccactttgccctctttccttctcttctcctcacagcagtgcctggtcaaacccagcaacccttggccagaacttactcacccatcccactgacaccatgaagcctgtgctgcctctccagttcctggtggtgttctgcctagcactgcagctggtgcctgggagtcccaagcagcgtgttctgagtaggtgctggatctgggcccaaggagggaagtaacatgtgtggataggagaggatctgagggctgacagtctgtcacacctcttggaaaaataccgtgtcatgttcaagggcccaagctttattgttggcaagatctaggtttgaatccctgctctgttgctgagtgaccttgggcatagtatctgggcctcaggtttttatccttataatgaatacaggaggagaacagataatgcatgcagacatagctcactcttactaaaccatggtaaatgctcagtaatattaaatgctgtaaatgtgatcagcctcatcatccagcttagtcttgctgcccgtggctccttcatggatgcttggactcacttttcaagcaataaaacagagagacaacgaagttggtagaactcaagctagaatctacataaccttggccttggaggatgttttgggaaggagggaaaggaagtcttgccttttattccacattttcaaactccagaggtactgtacaattaccggtaattagcatcaatgggacagtgtagagtccatctcagcagccaccactgcccagctcaactcaaaagagctctggctctagtaatgttgaccttaaccaataccaagtgggaaaagaactgttattcatcatacatccactcttctatggggaaaacatcttcagaatactggcggctcagaagagggataagtgtggtagctcatgtgtctggggaggctaggtcctgcttaagaagtttcagaaaaggcatgcaggtttgtaggactaagagggactaagcaagctacaagaaaataggagtgcccagggtagagttaattggagaatcagaatttgaggaaaggcacaaagaggctttctaaaagactggtaaatgctgtgagtgaagttgggaccagatacccagaagaggggtcaagacttgaaaagggtgacctctctgagatctctggatcatggtgtctatctctaaactgctctgttgagccccaagctcttcaaagtgtggattagttccaatttcttgcagtgccccagtgagctatagaatagctgagaggccaggggtgagtactagttattggtctctgttaaattgtcaacagcttgaacctcagcttcttttaccccaattctggtgccatttgctactacagttatagtcatgacctctttcttcattcattcctttcaaatcatcataatatcctatagatttccttctaattgcaaatatttgcagaggaatagacccacaattcctctatttgcaatagaatgccccacttttgacttttgcccccaaagaaagggagaatcacaaggtacaaaaattaggacctggaagggcttggggaaagggattaatggggcccatctttagagtccaggaatagaaaggagattgtgggttgtggacttagggaagactctcccagggcaggtaggtcttagctttgaactgaaatacttgggggtaggggaggaaataggaagtcaacataatgatgcttattcttctctaacagtagaaagtggggcatcctggtgctctggcctcctgatcgagagacaccaaggaagaaaaaagctgaatctttgaacgccattctgaaatccccacccttcttaccatgaaagaagtcactcccagaacttacttgtgaattgggtcccagctctctgatccagtaccttcagtttaatgcatggtcttcatcctttaccaaaacttacctttcactcattcttcctgtacacaaataacccatgttaggttaaccccagggtaaactatgttgttaatgagaagctctacaacttgctcaagaccacacaatgaatcagtgcagaacgaacatacaaacctctttcttgttcaccacatacaccattgatacccttgatatggacacaaccatagtcaatgggggcttggcatctgaactacaaggatggtgaatgaccaatgggtgcagggttctaccaaactctgttcttgatcaaaaaatatccatgccctgcttccctgctcagaactcagaggaaggcagcagctgaggacaaaacctgatgccaccaccctggaaccatgcaaggcagatgagggtggcaggtttcctggcagttccctgggctttctgagttctgaacattactccagcctgttggtgaggcccttctcttacttgttctgtgttccagagtatatcttggaacctccaccctgcatatcagcacctgaaaactgtactcacctgtgtacaatgcaggaagattgcgagaaaggatttcagtgctgttcctccttctgtgggatagtctgttcatcagaaacatttcaaaagcgcaacaggtaagagatatctcatatccaggtctgatcctagagctgctggtgggagcccagcagaagagtcccttaccagcaactgtgctggatctctccttttttttttttttccttggtggccatgttgccaacatgccccttctcttgaccaaggataatttccataaaagtcctgattagaaaagccctcctcccctcccaatcaccacatcccatcaccatatccgtgaatttctgactctgcctctctgaacacacccacaaatgcctttatccacagaccttcccccgacccagaatccacccttatcccagggacactgtacctgcaggtgtaaccaaaatcccaaagcaaaatttgtcctacacttttgcttgccctcctttcacaagacaccatcctttggccaccagtgttcttgggctctggagatccagcccaaaggaagttttgattaattgtccagacattaacactagccgcaagcctgctaaatggagtgtgctcccagggcagagaaaggacatagggtgctgatgagacatatggtttctaatcccatcttgcaactatgtctttctatgaccttgagtaagacaattccctcttttttactttctttttctcatgagtaaaataagtactcttgttttttcctgctttgcaaggcccatatgaaatttcaaaagactcacagtggaagactcaaccaatgagccctttgagggaagcctggcagtcttgttccctgctgtattccctaccatgagcagaatacccagcatgagataatgtgcagagtgattaagcatgggctcaaagccaaacacctgggctcaaatcctggcttcttagctaagtgaccttaagtgatcttagacaagctaattaacctctctctgggcatcaacttcctcatccttaagactggaacaataatagtgaggttaaaatagacaatccatgtaagctttaaaacattacttgccaacataattgctgtgaattttggggattaggcaaccacttctctttgaagagactagcccttgcaattaaattccacatctttcaatgctctacattggaatgcagaagcataaatataactctttggtgtcattgagttttttgaggttctgccttccctatggcaagagaaatgagcttcatggtctaatattaatggtggaagtaattgaaagaaaaatatatatctctaaaagtaaaacttcactagttaatatttgaaaatatttttcttctacagaatcaaacacaagggctcagaagtcatcatgcctgccaactgaggcatatttcctagatcattttgtaagtacagggatttggtctcgccttcctcatgtgagattcccagggatgctcactttcttcctgtagcctcaccaggggcactacattcccacaagctcagaatggcctctcattacctgattgcctcctcctccatcattcccctccaagggctatctttgcactccctgggggaggcacggtgcagtccagcatgaattctgcaacacagagcaatgtaaggaaccaagtcatggcccagggggaacccagggcactcagatctgaggctttgtcaaggaacaagctcttctagcctccgggttgacagcaccctgggcagggactcaagctgagcccttcacgctctgagactttggtctgctcactgtacctctctgagacagtcacctccctcatgtgaaatatgaagaaaacatccatgccttggggtattgggaggacaacacaaggccatgtagatggaagaacttggtctctgcaaaggtagaaactgccagcaactcacttacaaggtcactcattcaggttccagttttttctctgaaaaaagagggagtgggccgggtatggtgactcacacctgtaaccccagcactttcggaggccaaggtggacggatcacgaggtcaggagttcaagaccagcctgaccaacagagtgaaaccctgtctctactaaaaatacaaaaattagttgggtgtgatggtgcacacctggaatcccagctactcaggaggctgaagcaggagaattgcttgaacccaggaggcagaggttgcagtgagccaagagtgcaccattgcactccagcctgggcgacagagtgagactccgtctcaaaaaaaaaaaaagagggagtgggaatcatctttattattttactgatgcttcaagaatggtgaacaaaatggagtcctgtggaattccaccaccaaaaaaatgatagtattcataagttggtggatttcgtttcagagtatttgaaagaaaaagttagaagtttagggtcttctaatgggccttctgatgtctccagatgttccaaattagaatggtggtctttcagcttagtccttttattaaccctgtacaaaggagcgtgataaatagtagcaggtggaggccagtggagcagtttagacgcatgagcacttgcccaggctccggtgagcccaccatgctgcggatgagctcccactcatgcttcaaggtttctattaaattaaacactccatagaaacttcaccagttcactccagacagaattagtccctctctttgtcttttgtagtgtcctatctttggcctaccataacctagtgacccctgatccagggcaggaaatactgttcagaaaaatctatagactcttttactaccagaaactgaccatatgtggttcgagttgacctgagtgaggcaggtctcttacatacaggttggctatcactgttttaataatctgagtttgatctatccaatactgtaggcactggtcacgagaggctatttaaatgttaattcatatgaattacaataaaataaaatattcaatcagttccttagccttattttccatttcaagtgtttaataaccacatgtggttagtagctaccatattacacattataaatacagaacacagaaagttctaatggaaagcattgctttaagctacataaagctgatgtctaaaaaatgatggctaattaaaggtgatcatgacagaggacaccctctatgacagcctcatgttagactccaggaaaagtttttgggggctatttctttaaggagttcctaagcatagcctgacaacagacagttcaatgacagtaattctctagagacccaacatgatgtccaaggatgtttaaagaatcaagaagaataaatggactaattatctttccttccccacaggcctctacgatgttttttcttggtccacctttaggaaggtattgagaagcaagaaactggaggcccaatatctaacctgcaaatcgtttttgagtttggcaataaaggctaatctaccataaaactcttgaagcttaagctttaggtcaacacttgcaagagccccttccaaagctcagcacagtttcctcctgggatgaggagaggaatcagaaaccccactttggcatagagacaagcagcactgttccagtccagggatgctgtgtgtgccctggtggtggtcttaaggacctaccacatcaacatctggacaaccctcactgattacctgcccttggttgcactcatcaggctaattgatcccatatttaacctcaaggagaaatatcaaccagacactgcatggcaacctccttggggccagccttcaaggcttcatggccatatcatgaacccaggacaggcacagtgggggtggtgaggacctgatagagttggatcagtgactaagaggctgcaataaggtgccatgaaatcaaaatcaaagggctagaactctccaaggtcttgcccccggcatgtagcaccacctgagccagaaactgcagaggacatgacagtgtggcattactgataagttatggaaatggaaataatctttcctaaactaccaataataactttaaatttttgatcaaccatgctagagcaaagattgaattatccttctgttctctctacagaaatgatataaaaactatagtcataagaagagacaatcaaaaataatcagccataaaatattaaaaaggtattataaaggtatttaaaataataataataaagtgttattttcctgggattcatgatatttgatatattcgtaagcttttgttaagtttgtaatttgttgcaatttctttttcatttcaaataaatattcacttacgtgtctaattttgtattagtagttctgcattatttttctaaaacaaggtatccataattatacaagcatcaagctccacaaagcctgggcctttctctgcttgcctccattccttccaactctgtaccagtgagccttgtgttcctcattaggaaaacagcataagcaattgttcttcattttcacaagactgtacaaaaagattaaacaatataatatgcataaaaatatgttgtacgcactgtgacagaaatatgaatggttatgattattgttaacattttgaggacttactgcaaagggtgagatataaggaatggcattaaggaagaagaaaaatggattttcaccccttcatcagtgaatataatctatacaccatgacttctcacttaaccatagttgtgctactatggcacatcatctaaattcttcaaaacttgaatttttcatgcttaaaatagagataacaccacttaccttacgtaatttgtgatactaagttcttgattgtagtctggtggttgggaggcttaattaaataaccagtaactcagcagtatcaacttgctttgaagggaacatggctggactggaaagtacctgacacacaaccacacaggacaggctgaccctccaggatgaaatcttgaagggatgtttcagccaatcatgagtttatttagtttattaagaacaagtgacaggcatggggaatcttggaaaagatgctctaatagataggtccaactcttccccaggggagtgaataaagatgaaaagctaagagacaagaatttggccacaatgaagccagaataaaactgttcaaaaaataacaatgcttatggatatcttgcaaattcttgctgggagttctcttctcagtccatcccagcagagatggtgaaagatcagtagttcagtaggggctataccaagtcaataaggatacttgggagacacaatgaaaaaagagtcactttttcttgctgtcacctgggaagaagataaatatgaagactatggccctttggagagcactcttgtactctgtcactgcctcctataagtgcttagtcaacaatccaacataattttaggtttgctgggaaaggtgggtttggctgtgttaggaatggaatttacaattttgaaggtgaaatcttgtttgttcatgggttctgcttcccagccttgcagccaagactcgtatacaacttttgaggacaaaactttaattcatttctatatacccaacattgagaatagttactgaaatatagcaggagctcaataagtaagtaccttttaatgagatgagaaaggataaaatgctaaaatattgaggcaggggaattgcttgaatccagggggtggatgttgcagtgagccgagatcatgctacttcactccagcctggatgaaagagtaaaactttgtctccaaaagaaaaaaaaagaaagaaagaaagaaaaagcacttgagaaaaattcaacatttttttcataataaaagctctcaacgaattaggtatacaagccacgtatctctatataacaaaggccatgtataacaagcccatagctaacatcatactcaatgatgaaaagctgaaagctttgcctctaagatcaggaataagacaaggatgcctactctcaccgcttctattcaacaaaatacttgaaatcctatccagaaagattaggcaagaagaacaaataaaaggcatccaacaggaaattttccaataggaaaattgtctctgtttacagatagcatcttatgtatacaaaactctaaagacttgataacaaaaataactgttagaattaataaattcaataaaagtgcaggataaaatcatcaatatacaaaaattagttgaatttctctacactaactacaaactatccataaaagaaatcaagaaaaataatcccatttacaatagcatcaaaaagaataaaataggagtaaatataaccaaagaggtgaaggatctgtacactaaaaactatagaatattgataaaagaaagtatagatgacacacaaaaaatgaaaagatatcccatgttcatgagttggagaaattaatattgttaaaatgttcataatgcttaaattactccacagattcaatgcaatctctaacaaaattccaaagatattttcacagaaatagaaaaaacaatcctaaaattcatgtgagccacaaaagacactgaatagctaaagaaattctgagcaaaaaggacaaagctggaagcatcacacgtcatgattttaaactatattgcaaactacagtaatccaaacagtatggtactagcataaaaacagacacatatggcaacgaaacagaatagagagcccagaattaaacccttgcacgtacagtcaactaacttccaacaaaggcaccaagaatatacaatggggaaaggataatctcttcattaaatgatgttaggaaaacttacaccatacacaaaaatcaattcaaaatggactaaagacttaaacataagacctgaaactgtaaaactcttagaagaaaacatagggacaaagttccattggtctggacaatgatttttttttatttgaaaccaaaagcacaagaaacaaaaacacaaataagggagaccacattttctgcacagcaaaggaaacaatcaacaaaatgaaaatgcaacctatggaatggagaaaatctttgtaaaaaatacatttgataacagttaatatgcaaaatatataaagaactcctacaactcaataacaaaaaataaaaaataaaaaaatagtaaaagtccccaaacagacattttttcaaagacatacaaatggccaacaagtctatgaaaagatgttcaacatcattaatcattatgaaaatgcaaatcaaaaccacatgagctatgacatcacacctgccaggtgcctattatcaaaacaaaagataagtgttggcaaggatatggagaaaaggaaacccttgcacaccattagtgggaattcaaaatggtgcagccactatgcaaaacagagtgaatgttccttttaaaattaaaaattgaactaccatgtgatccactaatcccacttttgaatatttattcaaaattactgaaatcaggatctcaaagagatattaacacttagcacctctatgttcattgcagcactagtcacaacagccaagatgtgaaaacaatcttatgtacgttgacagatgaagacatttttttgaaatgtagtatatgcatacaatggaatactattcagccttttaaaaaaaggaaattctgcaatatgtcacaacatagatgaaccttgaggacattatgccaagtgaaaaaagccagtcacaggaagataaatacttcacgactccacttatatgaagtatctaaaatagtcaaatttatagaatcaatagtggaacagtggttgccagggcctgggtggaggtgaaatggataattagtaattaacaggcataaagtttcagtcaagcaaaagaaataagctctagggatctagtatacaacactgtacctatagtcaacaaaaacgtatcatacacttaaaaatatgttaaaacagtagacttcatgttaagtgcttttaccacaataaaataaaatttgaaaaaagaaagaataggggctgggcacagtggctcatgcctgtaatcccagcactttgggaggccaaggcaggcagatcatgaggtcaggagtttgagaccagcctggccaacatggtgaaaccccatctctactaaaaatacaaaaattagccagacgtagtggtgcacgcctgtaatcccagctactcaggaggccgagatgggagaattgcttgaacccagtgggcagaggttgcagtcagccaagatcacgccactgcactccagcctggatgacagagtgagactccatttcaaaaaaagaagaagaagaaggaataggaagtcattaaacaagtttactaagtagaaacaatctcctaaaacagaaaacaccaagtccacatgattttcagaaaagttcaatcaaatcttcaaggaataaaccatttcaatcttatatgaaatcatccagagactagaaatgactattcctgaattcagtctttgaggccatatagtcttagtgctcaaaccaaataaggagagcatgagaaatgaaaactactggccaatctaactcacaaacgtagatagaaaaatcttatacagcatattagcaaactaaattcagtagtgtataaaaagattatttagcataagcaactttatcccagaaatgcaagagtaaaaatgagaaaaacctacaaatacaattcaccgtataacaatttaaaagccatgtgattatcccaacagatgcaaaaaatagttttataaaattcaaattttgacagattacatttttaacacactgggaatataagggaatatccttaacaagataaagtgtaggtattttttttaaataaaacctacagtatacatcattcttaaaggtgaaactattagaagcagtcccttaaaatctgcaaaaaaaagacagggatgaccactacactgcttctattccacaatgtactaaagattctagccagagtgatgttaaaaaatagaaatttaaagcattcataattggaatagaaggcacaaaaccatcattagtcacagatgataactgcctatttttgtagaaggcaaagagaaccacatacaaattatttagaaataacaacagaatataggaaggtgactggatataagattaatatataaaatgaattacatttttgtacaccagaaaaacatagaaagaaatataatgtttaaagataccatttaagatggccaattacaggcagctgcggtcacagcactgctgaggaaggagagcagcaaagtgaattcaccaccttcaactgaaatatccaggttctcacattgggactgactaagcaatcagctcaacccatggagagcgaagaaaagcagggtggggtgagggcccacctggagcaacatggagccgaaggaacccccatccccaaacaagggaggcagtgagtgattgtgcgaccctgcctgggaaaccacacttctcgcacagatctttgcaacctgcagatgacgagatcccctcatgagcctacatgagcagcgccttggattcaatgcacagagctgtgtggagtctcagcagagcagcaatccagcacacacagagacccaggagttttacatactctggcctcgggatccccaacaagggggcagatccatctgtatattcccctaggaaggtggctgaatccagggagccaagcagcatcattctgcaggccccacttccacagcacctcacaagttgggacctgctggcttggagttccagccacagtggcagtaggcggagtctgcctgagactgggggagtttccaggacctggggggaggggtggctgccatttctgcagtttggtcaactagtatttcagcttgccagctctggacagtccaggcagtctggactagtccccttctatgcagcacacctgctttgccagatcgtgacagactgcttctttaagcaggatcctgatccattcctcctcactgggtggggcctccctgctgggagccctcagtcaccccagccaggcttatatggacagaattccgatctctccctgggatggagctcctatggggagaggtggccaccatctctgcagttgagttgactcagctgttccagcctgccagctctggagagtctaggtggtccagacaaggaagggtccccaccaacacagcacacctgctctaccaaaaagcagccagactgattctgtaagcaggtccctgatcccattcctcctgactgggtgagacctcccaacaggggtctccagacacctcctacaggagcattcaggccagcaacaggtcagtaccccctgggatggagcttccagaagagaagcgggctttgctgtttcgcagccttcactggtgatacctagagttacaggaaaagccaaggcagctaaggtctggaatggacccctagaaagccacagcagtcctacaggtgctaacagtcagtggcctgttaaaagaaaaacaaacaaatagaaaacaacaacaacaaaaaccccaccaaaaaaccccactcaaaggtcagcaaccacagaaaatctaaggtagataagcccacaaataagagaaaaaaaatcaatgcaaaaatgctgaaaactcaaaaagcaagaatgcttcttctcctccaaatgaccacaatacctttccagcaagtgcacagaactgggctgaggctgagatgacagatgagatgaagcttcagaaggtgggtaataatgaactttgctgagctaaaggagcatgttgtaacccaatgcaaagaagctaggaatcatgataaaacaacacaggagctgacaaccagagcagccagtttagagaggaacataactgacctgaaggagctataaaatacaacacaagaacttcacaatgcaatcacaagtataaatagcagaatagaccaagcagaggaaaggatctcagagcctgaagactatctatctgaaataatagaggcagacaagaatagagaaaaaagaaagaaaagcaataaataaaaactgagaaatatgggattatataaaaagactgaaccagccaggcacggtggctcacacctgtaatcctaggactttgagagactgaggcgggtggattgcctgaggtcaggagttcgagaccagcctggtcaacatggcgaaaccccatctctactaaaaatgcaaaaattagctgagcatggtggcaggtgcttgtaatcccagctactcaggaggcagaggcaggagaatcgcttgaacccagggggcagagattgcagcgagctgagattgcgccacttcactccagcctgggtgtaagaatgaaactccatcttggaaaaaaaaaactgaacctacaactgattgggatacctgaaagagatggacagaatggaatcaagttggaaaacatccttcaggatatcatccaggagaactccccaacctagcaagacaggccaacattcaaattcaggaaatgcagagagccccactaagataccccatgagaagatcaaccccaagaaacataattatcagattctccaaggtcaaaatgaaagaaaaatgttaagggcagccagagagaaaggccaggtcaccttcaaagggaagtccatcagactaacagtgaacctttccgcagaaaccctacaagccagaagagattgggggccaatattcaacattcttaaagaaaaaaatttccaacccagaatttcatatcttgccaaactaagcttcataagcaaaggagaaataagattcttttcagacaagcaaatgctgagagaatgcatcaccaccaggcctgtcttgcaagagcaccttgcaaggaaggaaggaagcactaaatatagaaaggaaaaaccattaccagccactacaaaaacacactgaagtacacagaccactgacactatgaagcaaccatataaacaagtctgcaaaataaccagctagcatcatgatgacaggatcaaattcacacataatgctaaccttaaatgtgaatggctaaatgcccccaattaaaagacacagagtggcaagctggataaagagccaaggtccatcagtatgctgtctcacaagcaaagatgcacatgggttcaaaataaagggagggaggaaaatttaccaaacaattggaaaacagaaaaaagcaggggttgcaatcctagtttctgagaaaacagactttaaaccaacaaagactttaaaaagacaaaaaagggcactatataatggtaaacggttcaattcaacaagaagagctaactatcctaaatatatatgcacccaatacaggaccacccagattcataaagcaagttcttagagacctatgaagagacttagacttccacacaataatagtgggagactttaaccccccactgacaatattagacagattatcaagacagaaaattaataaagatattcaggacttgaactcagctctgaatcaagcagacctgatagatatctacagaacattacacccaaaaacaacagaatatgcattcttctcatcaccacatggcacttactccaaaattgattacataatcaaaagtaaaacaatcctcaacaagggcaaaagaactgaaatcataacagtctctcagaccacagcacaatcaaattaggattcaagattaagaaattcactcaaaacaacacaactacatggaaattgaacaagctgctcctgaatgactcctaggtaaatgataaggttaaggcagcaatcaagaaattctttgaaactaatgagaaccaagagacaacataccagaatctctaggatccagctaaagcagtgttgagagggaaatttatagcactaaatgcccacctcaaaaacctagaaagatctcaagttaacaatctaacattacaactaaaagaagcagagaaccaagagcaaacaaacccccaaactagaagaaaacaagaaataaccaaaatcagagctgaaccgaaggagatagagatacaaaaaaaccccttcaaaaaatgaacaagtccaggagctgatttttgaaaaaaaaatcaataaaattgatagactgcaagatagactaataaagaagaaaaaagagaagaatcaaataaacacaattagaaatgataagggagacatcaccactgatcccacagaaatacaaactaccatttgagaatactataaacatctctatgcacataaaatagaaaatccagaagaaactgataaattcctggacacatacaccctcccaagactgaaccaggaagaaatcaaaacactgaatagaccaataacgagttctgaaactgagacagtaataaacagcctatcaacaacaacaacaacaaaaagcccaggaccagatggattcacagctgaattctaccaggggcacaaagaaaagctgataccagccaggcacggtggctcacatctgtaatcccaacaattacacatctgtaataccagccaggcacggtggctcacatctataatctgtaatcagaggctgaggcaggtctctactaaaaacacaaaaactagctatgcatggtgatgcatacctgtaatcccagatactcggggggcctgagacaggagaatcgcttgaacctgggaggcggcggttgcagtgagccgaaatcacaccactgcattccagcctgggtgacggagtgagactccatctcaaaaaaaaaaaaaagagaaaagaaaagaaaaaaagaaaagctggtaccatttctacagaaactattccaaaaaactgaaaaggagggactcctccctaactcattttatgaggccagcatcatcctgataccaaaacctggcagagatacaacaaaaaaagaaaacttcagaccaatacccctgatgaacattgatgcaaaagtcctcaataaaatactggcaaaccaaatccagcagcacatcaaaaagcttatccaccatgatcaagttggcttcatccccaggatgcaacattagttcaacatatgcaaatcaataaatgtgattcatcacataaacacagctaaagacaaaaaccacatgattatctcaataaacacagaaaaggccttcaataaaattcaacatcccttcatgttaaaaatgctcaatgaactagatattgaaggaaaatacctcaaaataataagagccatatatgacaaacccacagccaatatcatactgaatggggaaaagctggaagcattcccccttgaaaactagcacaagaaaaggataccctctctcatcactccttattcaatatagtattggaagttctgaccaggacaatcaggcaagagaaagaaataaagcacattcaaacaggaagagaggaagtcaaatcatctttgtttgcagatgacataatcctagatgtagaaaaccccatcgtcttagcccaaaagcgtcttaaactgataagcaactttagcaaactctcaggatacaaaatctgagtgcaaaaattgctagcattcctatataccaaaaacaggcaagcagagagccaaatcataaatgaactcccattcacaattgccacaaaaagaataaaatacctaggaatacagctaacaagtgaagagcttcttcaaggaaaactacaaaccactgctcaaggaaatcacagaggacacaaaaaaatggaaaaacattccacactcatggataggaagaatcaatgttgtgaaaatggccatactacccaaagtaatttatagattcaatgctattcccattaaactactattgacattcttgacagaattagaaaaatctattttaaaattcatatggaaccaaaaaaagagcctgaacagccaagacaatcctaagcaaaaagaacaaagccagaggcatcatgttatccaacttcaaactatactacaacgctacaataaccaaagcagcatggtactggtacaagaacagacacatagaaaaatggaactgaatagagggaactaagaaataaggctgcacatctacaaccatctgatattcagcaaacctgacaaaaacaagcaatgagaaaaggattccctatttaataaatggtgctgaaaaaagtggctagccacatgcagaaaattgaaactggactccttccttataccacatacaagaattaactcaagatggattaaagacttaaatgtaaaacccaaaactacaaaacccctagaagaaaatctaggcaataccattcaggacgtaggcatgggcaaagatttcatgatgaaaacaccaaagcaattgcaacaaaagcaaaaattgacaaatgggatctaattaaactaaagagcttctgcacagcaaaagaaactatcatcagagtgaacagacaacctacagaaatggagtatatttttgcaatctatccgtctgacaaagttctagtatccagagtctacaagaaacttaaacaaatttataagaaaaaaacaaacaatcccattaaaaagtgggcaaaggacttgaacaggcacttctcaaaagaagacatatatgtggccaacaaacatatgaaacaaggctcaacatcgctgatcattagagaaacgaaaatcaaaaccacaatgagataccatctcataccagtcagaatggtgattattaaaaagtaaaaaaaaaaacaaaaaacacagatgctggagaggttgtagagaaaaaggaacacttttacactgttagtgggcgtgtaaattagttcaactattgtggaaaacagtgtggagattcctcaaagatctagaggcagaaataccatctgacccaataatcccattactgggtatatacccaaaggaacataaatcattctattataaagacacatgcatgcatatgttcattgcagcactattcacaatagcaaagacatgaatcaatccaaatgcccatcaatgatagactggataaagaaaatgtgatactgaaatatatatatatacacacacacaccatggaattctatgcagccataaaaagaaatgagatcatgtcctttgcagggatatggatggagctcgaagcagttatcctcagcaaactaacacaggagcagaaaaccaaacactgcatgttctcacttacaagtggtagctgaatgatgagaacacatggacacataagtggaacaacacacactggagcatatcatgggggtggtagggagagggagaacatcaagaagaatacctggtgaatgctgggcttaatacctaggtgtagggatgatctgtgcagcaaatcaccatggcacacatggtttatgtatgtaacaaacctgcacatcctgcacatgtaccgctgaaattaaaataaaagttgaagatttttttaaaagatagcatttacaataatattaaaaatataaataagattgtaacacctgcatgagaaatgtcataaacctttctttaaaatattaatgaaggtcaaaatagatggaaatatatatatcaaagacaatattataaggatatcattcttttccaattgatttgtagatccagtgcaattcaaatgaatatccaaaataggtgttttgtttttgtttttgtttttgttttcgttttcggtcagagtcttgctctgtcacccaggctggagtgcaatggcacagtctcagctcactacaacctctgcctcccagttcaagcaattctcatgccgcagcctcccaagtagctgagattacaggaactcaccaccataaccagctaatttttgtatttttagtagagacggggttttgccatgttgaccaggctggtctccaactcctgacctcatgggattcacccacctcagcctcccaaagtgctgggattacaggcatgagccaccacgcctggcccgaaacaggtcttttgaataacttgataaactgactaaaatttatatgaaaatacaaaatcctaagataaacaaagttcaagagattaagtgtggctttggagtgggggtatacagtggagtgaaataaagggctcagaagcaatcccacataattaagcaaaattattttgcagttaaatagaagaggaactcattaataaataggtctggaaccactgaaaaatgaaaaaggatccttatgttataccttaccaaaaaatcaacatcaggtggttttagggtgtaaaggtaagccaaaacttcaaaacttttaggagaaaacagatccaagatgtcctcatgttcctagataacatagtgtagtgtgactaagaacaaaaactctgaagccaagttcaaatcttgtctctaccacataataaatgagtgaccttgtacatgtaacctaatctctgtctccatttcatccttaaatgatggtaataactgtacttacttcatagggtgtatatgatgataaagtatatacaaattacttaaaaatagcacctggaattaagtagtactctaggttataactaaccctgttactattattatagtgctattgcactctttctcttgtgccatgattagtttcttctgtgcataaaaggtcaaaaagagaaaggaagaaatccctttttaattcctcactctgatgattctacccttcatgattaaatatatgcagaagctctgatccttaagtttctattgcttctagatgaacatgggactcactatcaagggtctaatcagtttggggccttcagcttcatggctgggtacccaagcactcactgttcaactcaacacctagtaatgtccagtcctggcccttggggtaggtgagctcaaccgtctcaagtatcaagcccaaaatataacatcaggtgataccacaactatcctgcctgctgcttgctgcaccatgaagtctgccaagctgggatttcttctaagattcttcatcttctgctcattgaataccctgttattgggtggtgttaataaaattgcggagaagatatgtggagacctcaaaggtatgaagctaaggcagaaaataaatccaaaggtcaattatgaatgagagagaaggtattgggagaaaagtgtgttatctaggtagtccaggaaggtcttcctttcatgacaatacccatagacacttagtcccttgactcagggcattacttacactaggggtcctctggatgtttgatgagaaaaaacagaaatgacacaaagtcctttccagatggagacctcttttataggaggtccaaaggactggaagtattttgaatcagaggttgtgtgacaaatttcaaagatcccagaccattgatgattatgtattgggatgagagagaaagggggttggagacagagcaaattaagacattttcagtatctgggctatggacatatacagaactcttggacagatgattcctgtttagaggagctcacaatgtaaatgtgagaggcaatgagactttcttccatagatagtgtgtgaaggctcagcgcttccaggggacgagaaagtagcacagtttataccgtaagtcagacacttcaagttctggacctgttcacttagcagatatgtgcccttggacaagtcactcaaccacttattattctcttagtctcagtttccccatgtgtaaaatgaagatcagaaaagtgcctgctgcagagggtgtttgtgagtatgaaataagattatgcacataactttaccagagagtaaattccaggctggctgcttgagtaaggtggattgtcaatacaaccatgattgtggctgttccaaccacttactacccaactcttaacaataaaaacagagggtttgcctctgagaaggcaagaaaggagaagatgacggggtatgaggatgaacgagcatcaccccaaggttatgcattttagcattttagtatgcatcctgctttaaagatagcagcagccatggttacttaaattttgaagtataggtagtatagtgaatgtatgaaactggggaggaggcactctgaattgcatgtcctatgtgggcaattaaaaggaaaggaagatgatgtggggaagcaggaggatactgtactttaataaactgtaagataggaaatgtagggaagctcatcgccctgcacaagctagtggtggaacctcctttttcactgatcactacttctccttctccaatacactgctcacgacaacaacctggaattttaaccaatttgcattgtgcaagggcaacatttccaagcaactctaactccaagagaaaaccacatctttcagagtccttgaatatgagaatagttccaggctaaacgtaggaatttttaagggcccataaagacaagttctcctgctgagtccttaccaattcccactaactcaatgggaacctctcatgcagatccctgcaaattggacatgaattttggaagctgctatgaagttcactttagatatttctacaacagaacctccaaaagatgtgaaacttttgtcttctccggctgtaatggcaaccttaacaacttcaagcttaaaatagaacgtgaagtagcctgtgttgcaaaatacaaaccaccgtaaggaatctaatcctgtccttggtccttgggggtagtaaaagaagaggttttgacatcctaagatagagaaaattgatcaggggctaaccttgcttggagtgggaagagggaggattgctcaaataagaagttttaacagttgggttggccgggcgcagtggctcatgcctgtaaccccagcactttgggaggctgaggtgggtgtatcacctgaggtcaggagttcaagaccagcctgaccaacatggagaaaccccatctttactaaaaatacaaaattagccaggcatagtgtcgcatgcctgtaatcccagctactcgggaggctgaggcaggagaatcacttgaacccgggagggttcaagaagttcagagggttcagaggttgcggcgagccgagatcgcgccatccattgcactccagcctgggcaataagagcaaaactccatctaaaaaaaaaaaaaaaaaaaaaccacatttgggtgggctgtcaggatcatttgctcattttgcagttaggaaatcaaatgcccagagagaaaataatagccaccatctattggacaattactgtgtgtcaggcactgcactaagcaattaacatatattgatataatttaaaattatatcaaggtagggccaggcgtggtggctcacgcctgtaatcccagtactttgagaggccgaggtgggcggatcacaaggtcaggagatcgagaccatcctggctaacacagtgaaaccccgtctctaccaaatatacaaaaaatttgccaggcgtggtggcaggcgcctgtagtcccagctactcgggaggctgaggcaggagaatggtgtgaacccgggaggcggagcttgcagtgagccaagatcatgccactgcactccagcctgggagacaaagtgagactccatctcaaaaaaaaaaaaaaaaatatatatatatatatatatatatatatatatcaatagatatatatcattatttttatgtgacagatgaagaaaccaagtacagtacaagtaaccaagcatctcgaggtcacattattaaatggcacagcagggtttctaaccagagctgacagtcacaatggtcttgacaatcttacatggacaaggtcacccaaaccaaattcttgcactctcatacctttgaactcttcatagcaacttgctgctttatacaactaagctcccagcccatgcttgactatttcccaatcattggaaatagaaggtcaatggtgcctaacagggctgtggtttggctgattcccaggagaactggctggagagtggccttgggagtaactagaaagcagaaatgttgttttgtttattttatattcctagtggatcttttcagtgcctggcacatactaagcaatgattaagtgttaagtgaatgaaaaagtgaaagattaatcaataaaataagggaaacattgagatagaaggcatcctctgtgctttccctaggataaaaaatgacctgcattaatccagggagaccttcaaaaacctgtaacaccgatttgggtttttctttcctttgcttaaacaggaggtgagaggatgtgaactcatgaagttgtctgctgcaccatccgaaataaagacacaagaaaattcagactgattttgaaatctttgtaatatttccataatgctttaagcttccatatgtttgctattttcctgaccctagttttgtctttcctggaaattaactgtatgatcattagaatgaaagagtctttctgtcagccctggctctcttaatttctctccacttgtcttatctggatttgcagagctgaaatgtcagctggtcccatccattgatttccccctcactcctgagccatcccttacatatgcacacttagcttcatttatcctaaactgctaaactgtttcaggtttgacaagtctgtacaggtttgcatcacctcccctgtcaaattgaactggttagtggaaccaaagtaccaaacctatactcccttttgatcttgaaatcaaacctagcagcgaactgcacacttatgtgaaatgtccctgcactcataacaaatttttctttgtcgtgtttcctgattcaagtccctcaattagtttaattacctcccaacctggtccctgtttaggagtaattatatggacctctgtcattgctatttgacttgattatagtcagtccttctggaaaagaatcctcaacttcagtccagtgactgtgtttcagctaccaaaaaatgattatccaaacacaggttcccaaatcttctgcatataatgctacaaggtttggcatggccatgatcagcctagctgtaagatttacaagttgaccacttcacctctgaattttttcaggcatccaaactgaacctgcactgaagtaggaaaacctatcctggcacctgttattaccctctgcatatctaccatgtccatcttatagacaaagccaatccctcacctgtgaatcacaacctggaacaggggtagctagggccaacattgtaaaccagtgagaccataactagacacacaagcctgatctctgctccatcttaagactaggaagatcaatgccctaaattaagatgcttttctgcaaaaattctggtaactacaagatcataccctcaaccagacagggtttattctgagcaggtaaagtgctaataacccagttgattctggcatatttcatcttcaatgaagatcctaaaattatagatcattcttgagcccagccagctgcaagaccctaaaataatagagatgagactaatctaattagtccacatacacagaagttctgagattttcctgttatgaatcatgaaactgggtgtcccagaagcagacagtctttcagggacaagatagcatatttcgggagcctgtttgcttcctacttcagccaactccttgaaaagtcagagaagtaaaaaagaggtgtacagatatgaataaagtcaagactaagaatcctctgaggaaagaaggcaattgtatcctggtgagaaaaggaaatagatgcccaggacagattgttgagcatcaaaagtgagataatgagttgagtaagagcttttgaggctttcgagttgtgttattctccccaccacaaagatctggatcagtcattgcctgctctcttgccaaatcactaacagccacaaaataccagataacatagtggtcgttccagagtccagctagagaagtataaaagcataaaagaagtgagaagcataaaaacaggtgcaactgagctagccagacacagagtttactgttttctcttcctcctatatacagtaaggtttatgtgactaaaactaagaggaagaaaggttcctagaaaatacatctaggacagaagtgtagatattttctctggttggaggtggggggaggaagatagagaaataatgttatttaggaagaagcaaatggagtaaggaagcccaggctgtatcactgtaaagtctcttctctggaatcatctaccaccaccacaaccacccttgaatccaccaagagcagcacaagttaaaaaagttgggctttggggagctaagctattaaagtgcaaaggcataagaagaaggctgggctcagtggttctagcctggattcctagcagaaaccactgctcaaggaaatcagacaggaaataaaaaatggacaaacattccatgctcatggatagaaaaaaatcaatattgtgaaaatggccatactgcccagagtaatttatagattcaatgctattcccattaaactaccattgatattcttcattaaattagaagaaaactattttaaaattcatatggaaccaaagaagagtctgaatagccaaggaaatcctatgcaaaaagaacaaagctgaaggcatcatgttaccagatttcaaactgtgctacaaggctgcaataaccaaaacagcatggcactagtacaagaacagacacatagaacaatggaacagaatagagaactcagaaataagaccacacagctacaaccatctgatctttgacaaacctgacaaaaaaaaaagcaatgggaaaaggattccctatttagtaaatggtgctgggagaattggctagccatgtgcagaaaattgacactggactctttccctatacctcatacaagaattaactcaagatgtattaaagatttaaatgtaaaacccaaaactataaaaaccctagaagaaaatctaggcaataccattcaggatttaggcatggacaaagatctcatggtgaaattgccaaaagcaattgctacaaaaataaataaatagcaaaattaaaaaagcaattgcaacaaaagcaaaaattgacaaatgagatctaattaaactaaagagcttctgcacagcaaaaaaaaaactatcatcagactgaacaggcaacttacaaaaatggagtaaatttttgcaatctatccatctgacaaagtcctaatatcaagaatctacaaagaatttaaacaaacttacaagaaaaaaacaaacaatcccattaaaaagtgggcaaaggacatgaacagatacttctcaaaagaagataaaatatgcagccaacaaacatatgtaaaaaagctcaacatcactgatcattagagaaatgaaaatcaaaaccacagtgagataccatctcatgctagttggaatggcgatgctggagaggttgcagaaaaataagaatgcttttacactgttggtgggaattcagttagctgaaccattatggaagacagtgtggtaatttctcaaagacctagagacagaaataccatttgacccagaaatcccattactgggtatatacccaaaggaatataaatcattctattataaagatccatgcatgcatatgttcactgcagcactgtttcaaggaattatttattttcattcttaatttcttccttcacccattcaggagtatgttgtttaattttcatgagtttgcatagtttcaaatgttcctcttgttattgatgtctagttttattcattttggtcatataagatacatgatatgatttcaattttttttattatactttaagttctagggtacatgtgcacaacgtgcaggtttgttacgtatgtatacatgtgccatgttggtgtgctgtacccattaactcttcatttacattaggtatatctcctaatgctatccctcccccctccccccaccccacatcaagccccagtgtgtgatgttccccttcctgtgtccaagtgttctcattgttcaattcccacctatgagtgagaacatgcggtgtttggttttttgtccttgtgatagtttgctgagaatgatggtttccagcttcatccatgtccctacaaaggacatgaactcatcattttttatggctgcatagtattccatggtgtatatgtgccacactttcctaatccagtctatcattgttggacgtttggcttggttccaagtctttgctattgtgagtagtgccgcaataaacctacgtgtgcatgtgtctttatagcagcatgatttatattcctttgggtatatacccagtaatgggatggctaggtcaaatggtatttctagttctagatccctgaggaatcgccacactgtcttccacaatggttgaactagtttacagtcccaccaacagtgtaaaagtgttcctatttctccacatcctctccagcacccgttgtttcctgactttttaatggtcgccattctaactagtgtgagatgatatctcactgtggttttgatttgcatttctctgatggccagtgatgattagcattttttcatgtgtctgttggctgcataaatgtcttcttttgagaagtgtctgttcatatccttcgcccactttttgatgggtttttttttcttgtaaatttgtttgagttctttgtagattctggatattagccctttgtcagatgagtactttttgttacttgtttcatgtcctaacatatgatcagtcctgaagaatgttccacatgccaaagaaaagaatgtgtatcattcagttacaggatgaaatgttctgtaaatgtctgttaggttcatttggtctatggtacagttttaaaccaaagtttttttgttgattctctgtttagatatctgtccaatgctgaaagtggggtgttgaaatccccagtgattattgtattggggtctatccccttagatctaataatatttgctttataaatatgagtgttgtggtattgggtgcatatacaattattttatcttactaaattgattcctttattattatataatgtccttctttgtctacagatttttacttgaagtctgttttatctaagtagagctattccttgcttttgtttcccttggcatggattatctttttccattccttcacttcagtctatgtgtgtctttacagctgaggtgagtttcttgtgggcatcatatagttgggttttgttttttatccattcaactagtctaaaccttttaaatggggaaattaattaatttacactcaaggttattattgataggtgagaacttactcatcttttttttgttgttttctagttcttttttttttttttttttcttgagacggagtctcactccatcaccaggctggagtgcagtggcacgatctcagctcactgcaacctccgcttcccaggttcaagcaattctcctgcctcagcctcctgagtagccgggattacaggcacgtgccaccacacccagctaatttttctatttttagtagagactgggtttcaccatgttggtcaggcttgtctcgatctcgtgacctcgtgatccacccgccttggcctcccaaagtgctgggattacaggcatgagccaccgcgcccagcctttctggttcttttatagttcctttgttccttactttctctcttattatttttgcaggtaggtggttttctgtagtggtaagatttgattctctttttcctttgtgtattggctcttctagtgagttttatcattttatgttttcatgatggtggctattgtcttttcacttccagatataagactcccttgagcagttcatgtaagaccagtctagtagtaatgaattcttagtttttgtttgtctgtgtaagatcttatttctttttttttttttttttttttttttttttgagacagagtcttgctctgtcgcccaggctggagtgcagtggggcgatctcagctcattgcaagctctgcctcccaggttcacaccattctcctgcctcagcctcctgagtagctgggactacaggcgcccgccacaatgcccacctaattttttgtatttttagtagagatggggtttcaccgtgttagccaggatggtcttgaagatcttatttcttcttcatttttttttttgacaggctctcattctgttacctagtctggagtgcactggcacaatcatggctcactatagcctcaacctcccagactcaaccaaatctctcaccttcttttggctagctgggactacaggcacacaccatcatgcccagataattttttatattttggtagagacagggtctcactatgttgcctaggctggtcttgaactcctgggctcaagtgatcctcccacctcagcctcccaaattactgggattacaggcatgaaccacgacattcagcctctccttcatttctgaaggataatgttgctgggtatgatattcttaattggcagagttttatttttatttcagtactttaaatatgtcataccattttctcctgacctgtaaggtttatgctgagaaatatgatagtctaatggagattcatagctaatggtaattcccctatatgtgacttaatgcttttctcttgctgcttttaaaattctttctttgtctttgacttttgacaagttaactataatgtgcctcagagaggacctgtttgggctgaatcaatctggggttctttgagcttcctggacctgaatgtccatctctcccaagacttgggaagtcttctgacattattttattaaatatgttttccttaccttttccctttcttctctttctggaacacccataatatgcatattgtgcacttaatggaaaatggaattccacaaatcctgtaggctttcttcattctttttttctcttttcttttttaatctgcctatgttatttcaaaagtcctgtcttcaagttcagaaattcttttcttctgcttgggctagtctgttgttgaagctctcaattgtgttttttatttcattcattgaattcttcagctctaaggtttgtttggctctctttatgatatctatctcttcattgaatttctcattcaaataatgaattctgttcctaattttgttgactcatctatctgcattctcttatatctcactgagtttccttaagattattatttttaattcttttttagcatgtcatatatttccttatgcttagggtctgttatggaagaattattgttttccttttgaggtaacatgtttccttggtttttcatggttgatgtgtccctacattgatttctatatatctggtagaaaagttgcctcttacaattttatagagtaggttttgtaaggaaagacttattcattttcataggtattgactcagtggagttcattggccttggttctaggtggatgcagtagtatagtatccatttagtttcttctaccttagtccacactaatagtgtttgtgaatttctcagcggcctaggctaagagagtttgtgataatagtagtgaactttgccagaaatgggctttctaggcttttctcaggtggggagtgcatgtgtgtttctcaggtgggtcagccaaattggggttggggccacagagctgttattctggctgggagcactggcatgcagttgctcagtcaatctggacgtgtgtctgccaggagcaacccacagggctgtttctcaagcccagcatatgggtgtacagctgcttgtaaaggagtctttactaaaagaacaaatcacctagctgacctatggagtgattcccttcaagcatggtaacaaatcagtgtcttagcaaactagatagtcagaaggtggaagtccctcttgttaaacttatacaaaatttacagcctaaaattccttgaaacaaattttccaatctttcttcttcaaaatactttatgacatgggcagacccttatccactgcccaaaaatctgttgcccccaccacatgaaatgaatgaggacaagttcatttgggcttgtttgggctgttataacaaaattcagtagattggatggcttataggcaatagaaatttctcacagttctgaagactgagaagtctaagatctaagatctaggtctaagtataaaatcaaggtaccagcagatttgagatctggtaagaccagaactatttcttagttcataaatgataacttctccctgtgctctcacatggtagaaggggtaaacaagctcacttaggctcattttagaagggcactaatcccattacttagggctctgacctcatgacataatcacctcccaaaaagtcccatctcctaatactatcaccttggagttaggatttcaacatatgtatttgagggtatatgaacattcagagcatcgaactaagagtataaagtttaaatgttctcaccacaaaaaaactacatgaggtgatagatatgttaattattttgaccatagtaatcactttgcaatgtgtatatgtatgcatgtgtgtatatagtatatatatatatacacacatatatattaaaacattacattgtacacctcaaatatatacaatttttatttgtcaattatacttcaatacagttgggggaattaaaaaataaagtttcaagagaaaaaagaatttatctacttaatacaaaaccatgagtagtatacaaaaggttccaggtaccagtcataaataacaattttaaaatggctcaacaccctttcatgataaaaaaaaactctcaacaaattgggtgtaaaaggaatatatctcaacacaataacggccatatatgacaagtcctcaggaaacattatactaaacagtgaaaaattgaaagcctttcctctgaaatccagaacaagacaaggatgtccattcttcctacttctattcaacatattattgaaagtcccagccagagcaattagtcaagagggaaaaaagggcatcaaataagaaaggaacaagtaaaattgttggtatttgctgattacacaatcttatatatagaaaaccctaaagattccaccaaaaaactgttagaactaataaatgaatatggtaaagttgtaggatacaaaatcaacacaaaaagatcattagcatttctatacactaataatgaactatccaaaagagaaaacaaaagaacaatcccatttataatagctactaaagaataaaataatcagaaataaatataaacaaggagataaaagacctgtacatggaaccctataaaacattaatgaaagaaattaaagaagacacaaataaatggaaagatatcccatgtttatgggatggaagaattaatatcgtggaaatattcatctacccaaagcaatttacatagtcattgccatctctatcaaaatcccaatgtcattcttcacataaataagaaaaaaatcccaaattcatatggaaccacaaaaaaaatagccaaggcaatcatgagggaaaaaaaaaaaaaaaacgtagaggcatcatactactaatttcaaactatactacaaagtgataaaaatggcactgacataaaaatagacacattgaccaatagaataaagagtgcagaaatgaactcatacatatacagtcatttgacattcaacaaaggtgccaaaaatacacaataggaaaaggaaagtctctccaataaatggtgttgggaaaattggatatccaaatgtagaagaatgaaattggacccttatctcacaccatatacaaaaatgaactaaaatgggttaaagacttatacacataatgggaggcagaggttgcagtgagctgagatcatgccactgcactctggcctgggcaacaaaagcaaaactctgtctcaaaaaaaaaaaaagacttacacagaagacctgaaactgtaaaactactacaagaaaacagaggggaaaaaaactacaggacattggtctgggcaatgatttttcagatttggcctcaaaagcacaggcaacaaaagcaaaaatagacaaatgggattacattaaactaagaagcttctgcacaataaaggaaacaactaacagagtgaacagatgctctacagtttcggagaaaatacctgcaagccatgtatttcatagggggctaatattcaaaatacataaggaattcaaacaactctttagcaagaaaacaaccccatttaaaaaatggacaagggacctgaatgtttctcaaaagaagacacacacatggccaacagatatacaaaaaaaaagctcaatgttcctaaccattagaaaaatgcaaattaaaaccacaatgagtatcatcttgagaggtgacaacatgctggtggccctcgctcgctctcagtgctatcttggcctcggtgtctgttctggctgtgcttgagaagcccttcagcctgcagctgcactgtgggagcctctctctgggatggccgaggctggggctggctccctctgcttgcggggtggtgtggagggagaggcacgggcaggaaccagggctgcatgtggcactcgtgggccagcgtgagttccgagtgggtgtgggctcagcaggccctgcacttggagtggccggccggcaccgccggccctgggcaatgaggggcttagcacctgggccagcagctgcagaaggtgtgccgggtcccccagcgctgccgacccacctccgctgcactcaaattctcgctgggcctcggccgcctccccatggggcagggcttgggacctgcagcccaccatgcctaagcccccgacagtgggctcccacatagccggagcctccctgatgggcaccgccccctgctccatggctcccggtcccatcgactgcccaagggctgaggagtgcgggcgcatggcgcgggaccggcaggcagctccacctgcggccccagagcgggacccactgggtgaaaccagctgcactcctgagtctagtggggacttggagatcctttatgtctagctaggggattgtaaacacaccaatcagcactctgtgtctagctcagggtttgtggatgcaccaatcggcactctctatctagctaatctggtggggacttggataacctttatgtctagctaagggattgtgaatacaccaatcagcactctgtatctagctcaaggtttgtaaatgcaccaatcagcactgtgtgtctagctcagagtttgtaaatacaccaatcagcactctgtatctagctaatctagtggggacatggagaacttttgtgtctagctcagggattgtaaatacaccaatcagcaccctgtcaaaatggaccaatcagctctgtttaaaacagaccaatcggctctctgtaaaatggaccaatcagcaggatgtgggtggggccagataagagaataaaagcaggctgctggagccagcagtggcaaccggctcaggtccccttccacactgtggaagctttgttctttcactctttgcaataaatcttgctactgctcactgtttggtccacactgcctttatgagctgtaacactcaccacaaaggtctatagattcactcctgatgccatcgagaccacgaacctaccgggaggaatgaacaactccagacatgccgccttaagagctgtaaccctcaccacaaaggtctgcagcttcactcctaagccagcgagaccacaaacccaccagaaggaagaaactccaaacacatccaaacatcagaaggaacgaactctggacatgccgcctttaagaactgtgacagtcaggccaggcgttgtggctcatgcctgtaatcccagcactttgggaggccaacgtgggtggatcaagaggtcaggagatcaagaacatcctggctaacacagtggaaccccatctctactaaaaatagaaaaaaattagctaggcgtggtggcacacacctgtagtcccagctactcgggaggctgagacaggagaatcgcttgaacccagaaggcagaggtggcagtgagccgagatcgcgccactgtactccatcctgggtgacagagcgagactctgtctcaaaaaaaaagaactgtaacagtcaccgcgagggtctgcggcttcattcttaaagtcagtgagaccaagaacccaccaattccggacacaatctcacacctgtcagaatggccattgtcaaaaaaatgaaaaatatcaagtgttggcaggatgcggagaaaaggaaacccttgtacactgttaacaggaatgtaaattagtacagacattatggacaacattatagaggcacctcaaaaaattagaatagaattaacctatgacccagcaatcccacttctgggtatttactcaaaagattgaaaccagtatgttgaagagatgtctgcactcctatgttcattgcatcgactattcacaatagccaagttgtggaatcagcctaactttccatcaacaaatgaatggataaagaaaatgtgtgtttagttatgtacaatggaatactattcagcccttaaaaagaaattcatcctgctcaacctggtcctaatgctgccctggctgctcagctgacctccttttaccttctgatacctggatatccctctcctgttcagccccacagttcccaacaatttggttcctgctccatgatcagcattttcaataaaccagacactccagagaaaaaaaaaaaaagaaagaaattcagtcagttgtgacaacatgggtgaaactgaagaacattatcctaaattaaaataagtctacacagaaagacaaataccatatgttctcacttacatgtagaatctaaaacaatcaaactcatagaagcagaattagaatggtggttaccagaggctggagtgttgggggaaatggggagatgattgtaaagggtacaaagcctcagactagaaggataagattttttcaagatctattaacacaatgtggtgaatatagttaataatagtatattgtgcacttcaaaatcactaagagtagatttcaaatgttctcaccacaaaaaaataagtatttgagattatgaatatgttaatttggttgatttgattattccaatcaaatcataaattataacatcactttgtaccccataaatatatacaacaagctcgacacagtggctcctgcccataaccccagcactttggaagactgaggcaggaggattgcttgagcccaggagttcaagaccagcctgggcaacatagtgagacattgtctctacaaaaaaaaaaaaaaaaaaaaaacacaaaattagtcgggtgtggtggtgcccacctgtaattccagctactcaggaggctgaggggggaggattgcttgagcccaggagatcgaggctagtgtgagccaagatcatgccactgcactccagcctgggtgacagagcaagaccccaagtcaaaaaaaaacctatatatagttatagtttacaaaactatatatatagttatatatagttatagtttacaaaactatatatagttatatatatagttatagtttacaaaactatatatagttatatatagttatagtttacaaaactatatatagttatatatatagttatagtttacaaaactatatatagttatatatatagtttacaaaactgtatatatagttatatatagtttacaaaactgtatatatagttatatatagtttacaaaattgtatatatagttatatatatggtttacaaaactatatatagttatatatatggtttacaaaactgtatatatagttatatatatggtttacaaaactgtatatatagttatatatatggtttacaaaactatatatgtaacatatacaagttatagttgcatatatatatatagatacacacacaactataacttgtcgaaaatgaattttttttaaaaagcccaaaaaatggctcaatataaacaaatcccagtgtagaaaatgcctcagttccccgagatttacaataatgatcacagcccccaactgtcccatccttaattttctcaagtttatatgtttaggcaacttagggcactatgaatgggaaggacaattctacaaggaaaagttggaatgctattattagatgtgaaatatactgatgagcagacctaaacaactgctgttcactacctcccaacccttgactattccatgcatatactctctcctttctgttcataaatatgtttaatgccttggtctaacatcacaaaaagtacttacctactccttaaagggagacaatcgaaagtcagctccgactccttcaactggctacaagtataaaatctctaaatgagctctatctgtatattaccaataaatactgtgaaaaaagtggttaattatatcataaaccaacataccctatataaaacaataaaagaaataaaaaataaatgcttgaaaaatattaatgctacaacacaatgattaggaaaatacaggtagctttatttgtgctgttcattataagcccgtaatagctgacttgcgttaacaatcctcctctattatgcatttcatacttttgtgtttagccaataccacaaataagctgtgttctttatgtaaaacttcatttctgtgtgatattagcttttgagagaactgcctgggcaggctttacattttcccatcttttggactttaatggctcccattatattttacaactgagatggggtacaattatatgtatatatttttcaaggtagctaaggtgaaaattaaccctattttatcttcacagtttcaaaaattgcaggcaaactgtaatacccatcttttgtcaatttttttattcttatgaagagactgaagtggccagatataaatgtcaactctgaattgaacaggtccattttttaattgcttgatgaaagtattcccccatttagacacaaaaacaatcaaaccagtagagtgcataatcataagaatgggaagcaaaactattacaaagtagaatcttaaatactacctacaccaacttggtccccaaacctatgtgttttgacgatgctacaaagaacataagctcagggcttatactgcatacagcaagggaaatccccagccttgaaacatagttgcatcttcaactttataagacaatatgcctctagagatggtaatacactaggtaagtagatacataagcactaatatattttcttacttcttgtagtgggaagtaagttcctaaaacaggcaggaacaatatagtattatttgctaagatgaccataaggtattggacaagcccatcaaagctgatattaacaagatatggtggatgaaaaaagcaaatctaatgggatgattacaaaattctaggtcaggcacggtggcttatgcctgtaatcccagcactctgggaggctgaggcgagcagattgcttgagtccaggagtttgagaccagcctgagcaacatagtgaaatccatccctactaaaaatacaaaattatccaggcatggtggcacatgcttgtaatcccagctactcagaaggctgaggtgggagaatcacctgagcgggggagatcaaacctgcagtaagctgggatcacaccactacattccagcctgggcaaccagagtgagatcctgtgtttaaaaaaaaaaaaagtataggctgggcatggtggctcacacacataatttcagcactttgggaggctgagacaagaggatcacttgagctcaggtggtcaaaactgcagtgagtcatgactgcaccactgcagtctagcctaggtgacagagcaagaccctgtctcaaaaaaaaaacctgaaaaacatgacattttggaccaggtaatttttttttcaagttctgaagatgaacagtggtaaggaatccacaacaatgtgaatgtacttaatgtcactgaaatgtacactttaaaatggttaaaatggtaaatttggccaggtgtggtggctcacgcctgtaatcctagcactttgggaggctgaggatggcgatcacctgaggtccagagttcaagaccaatctggcctacatggtgaaaccccatctctactaaaaattgggtgggtgtcatggcacacacctgtaatcccagctacttgggacactgaggcaggagaatcacttgagcctgggaggcaaaggttgcagtgagctgagatggcaccactgcactccagcctgggtaacagaatgagacgctgtctaaataaataaataaataggtaaactttatgtgatgtatatttaagtacaataaaaaaccgagtctaagttcattataacagcatagtaatgaggaaaaatgtcccaaatgatctatttggttcttttgtaacatgggactaaattagtatcataccaacaaggacacttaaaagttgaaagtcacttgggttaaatttatgcacagtttctgtgtctaagactatggctatatcaagcccattacttggttaatggactgcctgagcaagaagatagatggaatttacagagtgacatatctggtccatctgattattaaggatatcttctatactgaggacccctgataaacagttacatgaaacatgaataatctcacattatagatccatttattcaacaaattttttttttttagatggagtcttgctctgtcaccaggctggagta[137 bp omitted]ggtttcaccctgttggccgggatggtctcgatctcccgacctcgtgatccacccatgtcggcctcccaaagtgctgggattacaggcgtgagtcaccgcgcccggcccaacaaattattctgtgtgtgtgtgtgtgtgtgtgtgtgtgtgtgtgtgtgtgtgtgtagacagggtttcactatgttgcccaggttggtctcctacccctgggcttaagacatcctcctgcttcagcctcccaaagtgctggtattataagcgtgagccattgcacccagctgtcaataaattattcttgacaaattaatatgtcataatagaatttccattcacattgtccttctctaaaacttgttctcaccaactttctagtcttacttattccgctacccttgcaatacaaggtcattccaaccactcccaaatccatgaattaggctatctttgcttgcaggtaaaatagacaagaatgcattttcctcaagttctgcctactgggaaatttttcattccccgctgtccttcagggcaaatgagttaaagcagcttgtttacaattagtcctaaaacacatttcactggagaacttgcgcaaaccaggcaacaatttttccaacattagacatctggtcttcaggaattctcaaagaagccataagtgtggatttcaaattctgtgacaacacaacaaaaacgggatatttcatgggctgggaatataatctacttgctcataaaacttacttgcacctttagggccatagtatacctggtaaaatgtagagtcctttttttttttttttttaatgaactgcttatgggttcaatgggtactccaagattttctcaagcatctttccttcacaggcctttaccaaacaaacaggaagttaatgatcctcactgttttccatctcataacattttcactcaatgtcttaaggcccacactctcgaatggaacatatcatctctccctggggacatgcagctcaaaatattcactcccacactcacacatgatcatacaggcacttcaggaacccaacatttaaataatactgtcattaggaagccctccttctcaacacacacgggcagaacacaaggcatctggcacttgggaacatatttatcccgccattgtagcctagggtctttgccactcaaccctgccaccacccagccttatcttaattggaacaatgaagctggtgatatggaggagcaaaaacattagctttgttggaaacatggaaccagcaccttcagattccttttactcaaagctctggtcctaacctttctccacactgtggggaatgtagtcttgccaacaccagacagttagcctctacccattgactataaaatcagatttcaactcttttatacaacttctttatgaaaaccttgaaaaaaagaatcgtatcttatttggctccctttaacaatatattatacaacagagaaactaaatatctgtatattgattatgctaacatgcaggacaggatcaaaactaacacaatagaattcaaatatgcaaaatcattcagagttattggaaaggtaaaaatgcaagtttaacattttttcaaagataatgtcctggctatatctatattgaggttccctacatttggtgctacatagaatttatgttattaatcttatggagctatagtgtcaggatatataacagaattgatactttatttatactagctggaccttttaaataccttctcatttataatgcccaaatggaaaataataatttatttccttagcaaggcaaatcttcacactaataagagaattgaattaagatttgcccaatatgaaccaaaatccttgaacattaaaaccctggattccctcactcttttttttttttttttttttttttgagacagagtctcactctgtcgcccaggctggagtgcagtggcaccacctcggctcactgcaagctccacctcccgggttcacgtcattctcctacctcagcctcccgagtagctgggactacaggtgcccgccatcacgcctggctaattttttgtgtttttagtagagacggggtttcaccttgttagccaggatggtctcaatctcctgaccttgtgatccgcccaccttggcctcccaaagtactgggattacaggcgtaagccaccgtgcctggcctccctcactcttacccaaatactcacagctcccaatcctcccattcatgagttgtttctgtctacactcatgagaaataatggacactgtgactgagagtccattacatgaaagggcagttctacaaagaaaaattaggatgctggctggccatggtggctcatgcctgtaatcccagcactatgggattacaaagcgggtggatcacctgaggtcaggagttcgaaaccagcctggccaacgtagtgaaacctcatctctactaaaaatacaaaaaattagccaggtgtggttgtgggtgcctgtaatcctagctacttgggaggctgaggcaggagaattgcttgaacacaggcagcagaggttgtagtaagccgagatagcgccattgcactccagccttggcaatagagtgagattccatctctaaaaacatatatatacacacatatatatatacatatacatacatatatgtgtgtacatatacatacatatatgtgtgtacatatacatacatatatgtgtgtatatatacatacatatatatgtgtatatatatacatatatacacatatacatatgtatatgtgtatatatatacatgtatatatgtgtgtgtatatgattgatatttaaattagtagactgagtaaaagagattacccttcatgatgcaggtgggcctcatccaatcagttgaaagccttaagaggaaataggctgaggtcccacagaggaaggaggtattctgactccagactgcctttgaactcaaaactgcaacatcaacacattcctgaacctccagcctgccagcatgccctgcaaatttcagatttgtccatccctacaatcacacaagccaattccctaacattggttttgtttcattgattctgttcctctggagtaccctaatacatagactttaaaacaaaaattataactagaagtacattttacaaaaagaaaagacagatttactcagcatcattatcagactatgacatttagcaatcaacagcatgggtgcaaaaaaaaaatctactttaaaaccctttgttggaatgctttatactttccacagaactgaaactaaaataacatgttattcaattagtcacaaatatagtccttgagttttttgcctatacacatgaatatttgtctaaagcatgtcttctttgtagcagctaggccctgccaccactgtgcttggctgcattcacaaatctgttgtaacctgtagcttccctgtcacttctctggctctcctctcctgctaagctttgtttcccggcagtaattaaaatcttctgccactgccatagctactactgctactggaacctccatggccaccttggttttgtggtttggcaaagtattgtcctccaccaccataggggtcagagcttctgcctccaaagttgcctcccttcatgattccaaaatttgaagactgatttttgtaattgtcaaaatcattgtagcttccactacctccaaaattacttccatcattaccaaatgcattatagccattcccactgccaccatatccaccaccaccatggctgccaccaaagccaccacaaccactgaagtttcctccacgaccaaaattgtcattcccactgaagccacctccaggaccaccaccaaaatttccagaaccacttcgaactctttggctagatgaagtactacccatctcttgcttcgactgggctttcgtaacttctaagctgtggctattcacagtattgtaattttttttttttttaagatggagtctcactctgtcacctaggctggagtgcagtggcatgatctctgctcactgcagcctctgtctcccaggttccagcgattctactgcctcaggctcccaagtagccaggattacaggcacacaccaccatgcccagctaatttttgtatttttagtagagacggggtttcaccatgttggctaggttggtcttgaactcctggcctcaagtgatctgcctgcctccccctcccaaagtgctgggattacaggtgtgagccactgcacccagtcaagcatgtttctaagaaaagggcaaacaattctcaaagaggcccctaatatctaaaaccagtttagaatccctgccctaggtgaatacaggaaacattgtcaaaactaaaaggaaacttgtagggcatcttaatcaatcagccaagatgggtgccaaagcccaaagccaggtagaggcttgtgcaagatcacaagcagaggcgcagtttgaagctagattctcccactcttaaactagtgctggacagactgaggcctagcaagttggctacagagccctagcagattcctgtctccacactgagccaggaggggttgctgcccagggataccgacagccatacttaagctggacaaggcacatgctcttggtggaagcaaacacgtccgctacctcatacagaaataaaaatgattataaaggaatcctgggaatatctgtatgctaaaaaattagataacttagatgaaatgaacgaattcttaaaaagataacaactaccaaaactgacttaaaataaatgggaaatctgaatagatctgtaaagagtagacaccaaatcactaatcaaaaaatattccacaaaggaaatcccaagctcagatgatttcaatggagaactctaccaaacttttacagaattaactctaatcatttacaaactcttccaaaatatagaagaggatggaatactttccaactcattctatgaggccagtactacagacaaagatatcataaaaaagaaaactacagaccaatagtccctatgaatataggcacaaaaattctcaaaaaatattagtaaaaagattcagccacatataaaaaaagattatatgccataatgaaatccaatggaatttgtcccaagaatgccaggttattcaagcatgcaaaaatcaatgtaatataccactttaacagagcaaagggcataaccaacataatcaactcaatagacacagaaaaaaaaattgacaaaaatctgtcaaccttttatgataaaaacactcctcaaattaagaatagaacttcctcaacctaaaaaagcacatttatgaaaaatcccgagataacatcatacttaatgggagaaattaaaaagttttcctttaagatcaggagcaagactatttcctggtaaatttttcctctcctccgtgtttgagttctatccatttcacatttctattaccgaacgtgtttatttcttctatgttttttccagccattattggcagttttgtctattttaatggtatttttaaaatacaaacttttagttttatttggcaattttagtgtttctttttttctaattcactaatttcaactactttcttcaattatcctctactttctctttacttactttgctgttttgttccagtttcttaggttcaagccttagttaatttgctttcaagtattcacatgtatatattaaagcattggtaagaatttatttacaactgttcattatagagatgttgatgtcccgagcaatagtggtcatgatccctagatgtggaggaaagaaggggggaaggctgaggttaatcagtagggttctggtaaagcatggtctttcaagctacatggctgggtacccaagaacttaactgttctgctcacaaggctgattctggatgcaccagaactctgcccaggcttaagccctggaaagataaaaatcagagatatgaattcaactcctcacatgagaaggacagctaacccttcagatatttcagtcaagtccgggattcttctatctgctgtctgcaacatcatgaagcctgaatgggctcacttttctctatggctcctcatcttgtccatgcttctccacacaccttcagggaacatatttcctccacaactcagaaaacagttacgtgaaagtggacatcttggaggtaaagaaaaacagaaagggcagaccaatgtgacactgtgaaggagagggaggtctgggcagcctgggtgatgttgctgccagtaattagaatcaagtctcctttttatctcaaaccgtatggctctaggacatctgattcagagaattacattgagtttcctctatggagtggagaaggaggaagacagaaagcagaatcaacttaagttttaaccatgagatttcagtataagagtgggggttatgaaaatgggattgatttcagaggtgtccaagaaattcctttgttggggtgtgtgtctgtacattagatgagttttgagtctattcaacacatatgtgtagaaccactatgttatattccactgatacagatatgcagaggccatcattcccccatatatgtatagagcactcctatcctacttatttaaattaatttgttcttcattcaaattaacatgagcatctgtgaaacactcaaggcaaaaggggcaagttcccaatcatggataagaattgcagttgggcggccaggcgcagtagctcacccttgtaatcccagcactttgggaggccaaggcaggcggatcacctgaggtcaggagtttgagaacagcctgtccaatgtggcgaaaccccatctgtactaaaaatacaaaaattagccgggtgtggtggcgcatgcctgtagtcccagctacttgggaggctgaggcacaagaatcacttgaacccaggcagcagaggttgcagtgagagccgtgatagcgccactacactccctcctgggcaacagagcgaggctccatctcaattaaaaaaaaaatttaaaaaagaattgtagttgggcttcaagaagactaacattaactctttctctgtctccaactcagtcatcatggcttctgctctaaccacttaatctccatggtctcagtaaaaccaggtgagtctggatgggtaggcaaaagtggggctggataggagaggaaatagactgatggaggaaaggaagatctgccagagtggacattttaaacctgtccttcagagtaggtgtagtgggtgagaggtctttttagcttgtgtatttgcacagactctggcgggcagagaggagagagtgaaagtaagggctctgaactatgtccttgaggaagctgatgagttgttcacttccagtgacatgggaagcatgtggagtcaagaaatgggatatctttactgcgaaagatgaaggaaacctcaggtctttcttgttctcagctctaaaatagtataagaacctcattgtgcttctctatttctgtgtcatggacccagtctgtagtctggaacaatttccccatatgcttagggaactctgtcttgttccccaggggtaaaattagttagatttatgtgggttggaagttttagtagtctgagcctgtgagaacaagaatgccaaaagagtagtaaagaaaacctgactctggaattctcattcacagaatactgcaactatcctctgaagaagggcacctgtaattcatatttgaccagattctactacaacactttgacatttttatgtgagccctttgtcttcagtggctgtggaggcaacagaaacaactttaaacagaaatatttctgtgaaaaaatgtgtattactgaaaagtaagtctctggatatcttacccaaccctcaatgacaccaaacactagggatcaaagctttttaaggaaaaaggaaatgaaaggcaagggcaatgagcagggaggcaagaaattatacctaagttagggatagcctgtcataggtattaatttctcaggtcacttaaatgtcactataatcagtcataggcataagtttttcaggtaacttagtttaataacattcttgaaattgtgaaaattgaagttcagccaagcacagtggtgtgcacctgtagtcccagctacttgggaagctgaggcaagaagattacttgagcccagcattcaagaccagcctgggcaatacagcaagacttccatttagatagatagatagatagatagatagatagatagatagatagacagacagacagacagacagacagacagacagacagatagatatagatagccaggcgcggtggcttatgcctgtaatcccagcactttgggaggctgaggcgggcggatcatgaggtcagtagatcaagaccatcctggctaacatggtgaaaccccttccctactaaaaatacaaaaagttagctgggcacggtggcacacacctgtaattccagctactcaggaggctgaggcaggagaatcgcttgaacccaggaggcagaggttgcagtgagccaagatcatgccactgcactccatcctgggcaacaagaacgagactctgtctcaaaaaaataaaaataaaaataaaaataaagctcagagaggctactgatttgcccaaattcactcagaagaaggacatggatccagagctcctagctccccaccagcatctcagtactaccaggatggcatcagctttttgagattgtgttcaacatcttattgtttcacagttaaatggaaagctatgagaatgtcagaagagtaggagaagacaaggatcatggtttagtatccactataaagaatagctaaacaatggtcttacacgcaagagcagagatatcactttattcatctgtatattctcaaagtctagtactatgtttgcccattaatattttatggatagatgcatgggtcaggaggaatattagtattaaagagagctgtgaagttctgctgagatgttaaggacccattgtttgggtccttattgataccaatggccataataatctctaaatttatttattcattaacagggaccaaagtcaatagggccttaatatgacagaaggaggaaacaaggaaaaaggagtatgctctatgaaaaatcatgccaaagttattctgagaaaataaattggattatttctaaaagatttttgaattctgaattctttctaatttccttgcccaggtttacctttcatactaattagatatataaaactttaactgaaaattttctgtatgtcagctctggtctgaatttattcatctctcccattctagattcttccaacatatactgcaaatgacctctctgcagggaccaacctatccatgtaatgcatcagtgtatgtaaaggcaatcattattgatatctcctcggcatgacatgccaaaactgagtttctttctgtattttgtcactgacttcagtgggatttgcatgtaggtggcaccaagataatcattattaaattctttcacctgctccaaatcaaagggcattcaacccacaaaagtgatcatattctagggaaatatcttcagtgccctagctacaagccatatggaaattgtgactttacagctgagagctatgagtcttgaaccaaagtgaacctctactctcagagcatgaagggccactcccttcttctctgtcttattcatattcttgtcaaggactaagcctcacaaatgaatctattgatataaatagcttatgccagtgttctaagggccataaacagtagaataaactgaagctcagagtgaagccacttgtgggtattctagctcgatctcaacactggcaacccctaatcctgaattatgggcatatcctaggagaaatcatgggaattagcaaaaagtatgtgttaaagatgtcacctagttctgcttccaggaattactcctgtgcaaaaaagggacaaaggaaacaagaatgttctggtagcttctaggtattgaggcaaagtctagaatctcagaccatgctgtgtcttgggcctgaatgtcatggtgcctattcatggattctgaagattttccttcctctgattactgtaaaaaacagtgttacataaacaagattcaagtgcaattttttaagtctttcaaaactatagtctagtccaaagaattaatataagtaaaatattctctggagacaaagaattaccgacaatgatgacccaaagttcattctagcctcaagttttcagatttcttctgggcacttgagtaattgcccaagtttctttctcaatcaatcctatatttgcatctaagaaaaaggtatgtgtgtactgtctgtagtgctgaaggaatattttataattacccacaaagattagtaaaaaggcccaaagatatatgtgcattgcagaccttcatagaaaaccacatacccaaggactaatacaggacacaaatccacaagaaacccaagtggatttcacattaaattcaagtgagatattttgaggagaaagtcacagatagaagagtaacaaagataaaaatataaaccaaaacctcagagtacaaaccaaagacagaatgaaaagattttggttctgactctagcctcttcccctgagtcatatcttaccactggagaaactgaaaggaaaagatcccattacatatgagatggaaattaaaagtggtttaagaagattctgatttctcatttaaaaagccccaaagagtaggcgtagtgactcacgcctataatcccagaactttagggggtcaaggcaggaggatcacttgaggccaggagtttgagaccagcctgggcaacacagcaaaacttgtctattaaaaaaatacaaaagatggccaggcccgatggctcacacctgtaatcccagcactttgggaggccaaggtgggtggatcacctgaagtcaggaattcgagaccagcctggccaacgtggtgaaacccca[133 bp omitted]cactccagcctgggcaacaagagcgaaactccacctcaaaaaataataataataataataatacaaaaggccaggtccagtggctcatgcctgtaatcccagcactttgggaggccaaaacaggcggattgcttgagttcacaagttcaagaccagcctggacaacacggcaaaactccatctctacttaaaatacaaaattggcaaggcatggtggtacatgcctgtagtcccagctgcttgggaggctaaggtaggatgccggcctcagccaggagacagaggttgcatgagccgagatggcaccactgcactccagcctgggcgatagagccagatcttgtctcaaaaaaaaaaaaaaaaaggtggtggggagaagaaaaaaaattgtaatacaaaagataaacaaaacaaaaagttgtttttttggaaagataacaaaactggcaaacctttagctagactaaccaagaaaaaaatgaagaccaaataaataaaatcagggatgaaaaaggacacattacaactgataccgcagaaatacaaagaatcactagagactttttttttcccctgagatggagttttgctcttgttgcccaggctggagtgcaatggcacgatctcagctcactgcaacctccacctcccgggttcaagcgattctcctgccttagcctcctgagtagctgggattacaggcatgtgccaccacacccagctaattttatatttttagtagagacagggtttctccatgttggtcaggctggtcttgaactcccgacctcaggtgatccactcgcctcaggcttccaaagtgctaggattacaggcgtgagccaccgcatccggcctggatcattagaggctattatggaaaactacacaccaacaaattggaaaactaaaaagataaattatttgacacatacaacttaccaaaattgaatcataaagaaacagaaaacttaaacaggccaactatgagtaatgagatgaaagcagaaattaaacgtatctctttaaagaaaagcataggacctgatggttttactgctgaattctaccaaatatttgaagaagaattaatacaaattctactcaaattattctaaaaaattgaagagggaatacttccaaactcattctacaaggcaagaagtaccctgtggccaggcatggtggctcacgcctgtaatcccagcactttgggagactaagagaccaaggcaggtggatgacttgaggcgaggagttcaagaccagcctggccaacatggcgaaaccctgtctgtactaaaaatacaaaaattagccagggaggtggcgcatgcctgtaatcctagctactcaggaggccaaggcataaggatcgcttgaacccaggaggtggaggctgcaatgagccaagatcgtgccactacactccagcctgggcaacagggcgagactctgtctcaaaaaaaagatcattcaccatgatcaaatgggattcatccccagatgcaaggatagttcaacatatacaaatcaataagcgtaatacaccccatcgacagaatcaaaagagccatatgatcatttcagtagattgtgaaagagcatttgataaaattcaacatcccttcatgataaaattctcaagaaattggatatagaaagaacatacctcaatgcaataaaggccataagtgacaagcacatagctaataccatacggaatggggaaaaacggaaagccctttccactaaggtctgaaacaagataatgatgccactttcaccactgttattcaacatagtactagaaatcctagccagagcaattaggcaagagaaagaaataaagggcatccaaattggaaaggaagaagtcaaattagccttggaaacacatgacatgatcttatttttagaaaaacctaccccaccaaaaaattcttagaactaatcaacaaatttagtttaattgcaggatacaaaatctacatacaaaaatcagtagtgtttctatatgctaacaataatcaatctgaaaaagaaaccaataaagcaatctcctttacaatagctacaaaaaaaaaaaacctaggacaaaattaattagaagatctccacaaggaaaactataaaatactaatgaaagaaactgaagagtacaccaaaaaatggaaagatatcccatgctcataggtcagaagaattaatattgttaaaatgcccataatatccaaagtgaccttcagattcaatacaatctctattaaaatatcaatggcattcttcacataaacaggaaaaaaaaattctaaaatttgtatggaacgacaaaagaccccgaatagctaaagcaatcctgggcaaaaacaacaaagctggaggtatcacactacctgaattcaaattatacaacaaagctatagtaaccaaaacaaagctatagtaaccaaaacagcatggtattggcacaaaaacagacacatagaccaatggaacagaatagaaaacccagaaatcaatgcatgcacatatagacaactctttttttttttttttttttttttttgtgagacggagtcttgctcggtcaccctggctggagtgcagtggcgtgaactcagctcactgcaagctctgcctcccgggttcacgccattttcctgcctcagcctcctcagcagctgggactacaggcgcacgccgctatgcccggctaatttttttgagacaactcatttttgacaaaggtgccaagaacatatattggggaaaggacagtcttgttaataattggtgccgagaaagcgggatatctatatgcagaagaatgaaactagattgcaatcttttaccatatgcaaaaatcaaataaaaattgattaaatactgaaatctaatgcctgaaactacaaaactagaagaaaacattagtcaggacattggtcttgggaaagattttctgggtaagacctcaaaagcaaaagcaacagaagaaaaaacaaacaaatgggattacatcattaaaaagtttctacagccaggcgcggtgggtcacgcctgtaatctcagcactttgggaggctgaggcaggtggatcacctgaggtcaggagttcaagaccagcctggccaacatggtgaaacccc[132 bp omitted]attgcactccagactgggggaaaaaagcaagacttcatctcaaaaaaaaaaaaaaaaaaatttctgcatggcaaaggccagttgcctttaatcccctataatccccacactttggaggccaaggcaggcagatcacctgaacctgaggtggagagtttgagaccaatctgggcaacatggtgaaaccctgtctccactaaaaatataaaaatcagccagatgtggtggtgcacacctgtaatcccagctactcgggaggctgaggcacaagaatcacttgaacccaggaagtggaggtttcagtgagccatgattgcagcactgcattccagcatgggcgacagcgtgagaccctgtctcaaaaaagaaaagacaagctacaggatggaagaaaatatttccaaactacctcatcaacaagggactaggctatgcacagtggctcacacctataatcccagcactttgggagacagaggcagcaagatcacttgaggccaagaatttgagaccagtccgggcatcatagcaagactctgtctctacaaaaaaaaggcaacaacaggaattaaaaatatataagaaactcaaacaactcaataccaaaaaaaaaaaaaaaaaaaaatctggctggcacagtagttctcgcctgtagtcccagcacaaggccaaggcaggtggatcacttgaggccaggagtttgagaccagcctggccaacatggcgaaaccctgtctgtactaaaaatacaaaaattagccagatgtggtggtgcatgtctgtaatccctgctacttgggaggctgaggcaggagaatcatttgaacccaggaggcagagggcagagtttgcagtgagacgagactgggccactgcactccagtctgggcaacagagcaagactctgtgtcaaaaacatatatatatatatgcgtatatatacgcatatatatacatataagtatgcatatatatatgtgtatatatatgcatatgtatgtatatatatctgtatatatatgcatatgtatgtatatatatctgtatatatatgcatatatacatgtatatatatatctgtatatatatgcatatatacatgcatatatatgtgtatatacatacagatatatatatacacacacatatatacatatatctcaaataaagagacattcttgggcaaaggggatttgtcccagtggtcttgacagtgccacaaatcattttaacacttttgggtatagccagaaccatcctagtggtctgaaacacaaaagtgaggcccagactacttagggagatcaggctgggtgccagaaattaaaaggataggagccagagacaggtaagcagaaagtttacaagaaaaaaaaatggaagatgaacaaagaccctaggcctctgccaggtgggctgtgagagaagaggtttcaaaagaggaagaacttaagatgacattcttacagacagacccctggccattgcagaagcatttctgggctccttggcgccccccagtccaggaggcactgcaggacacaggaggccttggagctcatgggcaccagagcccaggcttccatgtagctgagatacgatctggcactgcagtcctcaaggtcttgcaggggccctctgacccccggttccagccctgggacacaattgccctgctacatgcttcctttctataattaaagaaggaaaccctcagggcaccccactccaccactcacctctcgccagggaccaggtaccagggtgggtgtcctcttcctgaaaaagaaaggcttagatgaagcagtcccttgtgaaacaggcagccattagcaccagggcccagcctaggtgagaactctcaggccctgcctggcagcccacagccaggcatggttgagataccaagttactctacagatgtctttgttttttgttttttttgagtcagagtctcactctgttgcccaggctggagtgcagtagcgtgatctcggctcaccgcaacctctgcctcccaggttcaagcaattctcctgcctcagcctccagagtagctggaattacaggcgcccaccaccaagcccagctaatttttgtgggggttttttggggtttttttgtttgtttgtttttgagacagagtctggctctgtcacccaggctggagtgcagtggcgcaatctcggctcactgcaagctccgcctcccggcttcacgccactctcctgcctcagcctcctgagtagctaagactacaggcacccaccaccacacctggctaattttttttttgtaatttttgtagagacagggtttcaccttgttagccaggatagtctcaatctcctgacctcgtgatccacccacctcagcctcccaaagtgctgggattacaggcttgagccaccgcacccggccaatttttgtatttttagtagagacggggtttcaccatgttggccaggctagtctcaaactcctgacctcaggtgatccacccgcctcagcctcccaaagtgctgggattacagacatgagccaccgtacccagcctgcatttttttttaagcattaggttggtgaaaaaatattttgattttttttaaaacaagcaagcattacttttgtgatcttttaaaactgattggatgaaaaaatggaaaatgtaacataagaagtgtcagacctctgagcccaagctaagccatcatatcccctgtgacctgcacatacacatccagatggccggttcctgccttaactgatgacattccaccacaaaagaagtgaaaatggcctgttcctgccttaactgatgacattgtcttgtgaaattccttttcctggctcatcctgtctcaaaaagctcccctactgagcaccttgtgacccaccccccaactctgccctccagagaacaactcccctttgactgtaattttcctttatctacccaaatcccataaaacggccccacccttatctcccttcactgactctcttttcagactcagcccgcctgcacccaggtgaaataaacagccacgttgctcacacaaagcctgtttggtggtctcttcacacggacgcgcatgaaatttggtgccgtgactcggattgggggacctcccttgggagatcaatcccctgtcctcctgctctttgctccgtgagaaagatccacctatgacctcaggtcctcagaccgaccagcccaagaaacatctcaccaattttaaattgggtaagcagcctctttttactctctcctccaacctccctcactatccctcaacctctttctcctttcaatcttggtgccacacttcaatctctcccttctcttaatttcaattcctttcattttctggtagagacaaaggagacacgttttatctgtggacccaaaactccggcgccggtcgcagactagggaaggcagccttcgcttggtgtttaatcattgcagggatgcctctctgattattcacccaggtttcagaggtgtcagaccacgcagggacacctgccttggtccttcacccttagtggcaagtcccgcttttctggggaagggtaagtaccccaacccattctctctgtgtctctacctcttctttgcctttctggggggcaagaaacccccaaccccttctccttcacccttagcggcaagtcctgcttttctaggggaggggcaagtaccccaaccccttatatctctgcaccccgatcccttatttccacgccccaaccccttatatctctgtgccccaatcccttatttccacgccccaaccccttatatctctgctccccgatcccttatttccgtaccccaacctcttatatctctgcacccgatcccttatttccacaccccaacctcttatatctctgtgccccgatcccttatttccacaccctgacctcgtatctctgtgccccaacccctttcccacttttctggagggtaagaacccccgaaccccttccctccgtgtctctactctctcttttctctgggcttgcctccttcactatgggcaacattccaccctccattcctcctcctccttctcccttcctgtgttcttaagaacttaaaacctctttaactttcacctgacctaaaatctaagcaccttattttcttctgcaacaccacttgaccccaatacaaacttgacaatggctctaaatggccagaaaacagcactttcgatttctccatcctacaagacctaaataatttttgtggaaaaatgggcatttttcacacttcgttccctccctagtctctgttcccaatacgattcctcccaaatcctccttctttccctcccgcctgtcccctcagtcccaaccccaagcgttgctgagtctttccagtcttccttttttctacagacccatctgacctttctcctcctccccaggctgctcgtcgccaggccaagctaagtcccaattcttcctcagcctccgctcctccacactataatccttctaccacctcccctcctcacacccggtccagcttacagtttagttctgcaactaattcttccccacctgcccagcaatttcctcttagagaggtggctggagctgaaggcatagtcagggtacatgtacctttttctctatcagacctctctcagatcagtcagcatttaggctctttctcatcagaccccactaaacatatacaggaattccaatatctaactctgtcctacaatttaacctgaagtgacttaaatgtcatcctgacttctaccctctccccagatgaacaggaaagagttttttctctagcccaatttcacactgataaccgccggcttcgtgaacctgacctccaggaaggcagtagagcagttccccgagaggacccccaatggaactataaggcagattccccaggtacagctaggcgagattacatggtttcctgcctagttgaagggcttaaaaaggcagcttacaaagctgttaattatgacaagcttaaagaaactacccgaggtaaagatgaaaacccagcccaggtcgtggcccgcttagcagcaacccttacacactttaccgccctagacccagaggggccagaaggccgccttattcttaatatgcattttatcacccaatccactcctgacattaggaaaaaacttcgaaaattagaatcgggccctcaaaccccacaacaggaattaatcaacctcgccttcaaggtgtacagtaatagagaggaagcagccagacggcaacgcatttctgagttacaattacttgcctctgctgtgagacaaaacccagccacacctccagcacacaagaacttcaaaatgcctaagccgcagcagacaagcattcctacaagacttcctccatcaggatcttgcttcaagtgccagaaatctggccactgggccaaggaatgcccgcagcccaggattcctcccaagctatgtcctatctgtgcagggacccactagaaggcagactgcccagctcgcccggcagccactcctagagcccctaaagctctagcccaaggctctctgaccgactccttctcagatctgctcggcttagcgactgaagattgacgctgcccgatcacctcggaagccccccggaccatcatggacgccaagcttcaggtaactctcacagtggagggtaagtccatcccctgtttaatcgatacgggggctacccactccacgttaccttcttttcaagggcctgtttccctcaccccgataactgttgtgggtattgacggccaagcttcaaaaccccttaaaactcccccactctggtcccaacttggacaacactcttttattcactcttttttagtcatccccacctgcccagttcccttattaggctgagatattttaaccaaattatctgcttccctgactattcctggactacagccacatctcattgccacccttctccccaacccaaagcctccttcgcgtcttcctcttgtatcccaccttaatccacaagtatgggacatctctactccttacctggcaaccaatcacatgcccattaccatcccattaaaacctaatcacccttaccctgctcaatgccaatatcccatcccacagcacactttaaaaggattaaagcctgttatcactcgcctgctacagcatgggcttctaaaacctataaactctccttacaattccccattttacctgtccaaaaaccggacaagtcttacagattagttcactattcccctgcacccctcgtcccagcctctctttgctttcacttagactgaccctgacacccattaggctcagcaaattacctgggctatactgctgcaaggcttcacagacagcccccattacttcagtcaagcccaaatctcatcctcatctgttacctatctcggcataattctcataaaaacacatgtgctttccctgctgatcatgtccgattaatctcccaaacctcaatcccttacaaaacaactcctttccttcctaggcatggttagtgcagtcagaattcttacacaagagccaggaccgcaccctgtagcctttctgtgcaaacaacttgaccttactgttttagcctggccctcatgtctgcgtgcagcggctgccgctgctttaatacttttagaggccctaaaaatcacaaactatgctcagctcactctctacacctctcataacttccagaattattttctttctcacacctgacacatatactttctgctccccggctccttcagctgtactcactctttgttaagtctcccacaattaccattgttcctggcccggactccaatccggcctcccacattattcctgataccacacatgacccccatgactgtatctctctgatccacctgacattcaccccatttccccatatttccttctttcctgttcctcacccaatcatgcttgatttattgactggcggttccaccaggcctaatcgccacacaccagcaaagacaggctatgctatagtacaagccactagcccacctcttagtacctctcatttcctttccatcgtggaaatctatcctcaaggaaataacttctcagtgttccatctgctattctactactcctcagggattattcaggccccctcccttccctacacatcaagctcaaggatttgcccccacccaggactggcaaattggctttactcaacattccccgagtcagataactaaaatacctcttagtctaggtagacactttcactggataggtacaggcctttcctacagggtctgagaaggccaccgcagtcatttcttcccttctgtcagacataattcctcagtttagctttcccacctctatgcagtctgataacagacgagcctttattagtcaaatcagccaagcagtttttcaggctcttagtagtcagtgacagactaatggtctattaaaaacacacctcaccaagctcagccactaacttaaaaaggactggacaatacttttaccactttcgcttctcagaattcaggcctgtcctcggaatgctacaaggtacagcccatttaagctcctgtatagacgctcctttttattaggccccagtctcattccagataccagaccaactcagactgtgccccaaaacacttgtcatccctactatcttctgtctagtcatactcctattcactgctctcaactactcatacatgccctgctcttgtttacactgccagtttacactgtttctccaaaccatcacagctgatatctcctggtactatccccaattagatgtcctaggtcctcccaattcttagtcctttaatacctgtttttgtccttctctaattccgtttattttttaattcatacaaaactgtatccaggccatcactaataattctaaatgacaaatgtttcttctaacaaccccacaatatcaccccttaccacaaaatcttccttcagcttaatctctcctactctaggttcccacgccgcccctaatcctgctcgaagcagccctgagaaacatcgcccattctctctccataccacccccaaaacttttcgccgtcccaacactttaccactatttcattttatttttcttattaatataagaagacaggaatgtcaggcctctgagcccaagctaagccatcataccccctgtgaccttcacatacacatccagatggccggttcctgccttaactgatgacattccaccacgaaagaagtgaaaatggcctgttcctgccttaattgatgacattgtcttgtgaaattccttttcctggctcatcctgtctcaaaaagctcccctactgagcaccttgtgacccccactctgccctccagagaacaactcccctttgactgtaattttcctttatctacccaaatcctataaaatggccccaccctgatctcccttcgctgactctcttttcagactcagcccgcctgcacccaggtgaaataaacagccacgttgctcacacaaagcctgtttggtggtctcttcacatggacgcgcatgaaaagaagaatactttaaaaaaaaaaaaaaaagcagcatcagcaccacctggaagcttgttatttatacagaatctcagacccacctgaaacctactgcattggaatttgcattttaacaactctggtgatttgttttctcatttcacaagttgtagtctgtgaaaaatcaggagctatcaggaaaggagatctactcccctggctactgcgaatcaaggtttcttctgcatctacgactgctacccataaaatgtgaaatacccttcaggaatctatacggctctaaagactcatagtgagatgttaagtatccctttctccttcctaatagcagcctatttcctttcaaggaattctcttcccctgttctatgtcttgttgtgagggttaatttcaggtgcctgctaacccaaacaagccagagaagcaattcttttctctaggttctcaaccaggggtgattttgccccccaggggacattttggcaacatctggaaacatatttgtttgtgacaaatgacagggagagattctggcatctagtgaaaagcagccggagctgctgctaaacatcatatagtacccaggatggcccctcacagcaaataattatccagcccaaaatattaataggaccaaggctgcgaaaccctgaatgagtaattacatatattctccctctttcaggaagtctcaatcttgagagaagggggaaagagaaatagaacatcgctgtcacagcagcgtcactgtgacccaactcttcctgcctagatgacctgcttcctccctcttgaccctccagagtgctgtcaattccctaccatggagccctagctttgcataaatcatacgagccccaatttccttccagttcactgtcatttgcccaagtcagccagtatctttctgttgatggtaaccaagaacccttacgcccaaccatccaattagaggagggctccattccagggcagggcaggcttacccagctgctaggctaagcacacacttcaagcatcagcaagtaactgacaagttcagcttgaatgaacttaaccagaatttgcagtcaagaaaactagaaagaaactgttttaatttcagtataagtgtttcattttgcatcaagtgatttaaacagttcattatttgggaccctgatgttctgggccatcaggtggggcaggtttgctctggttttgagtttcagtgctaagaaggaagaggaaaacgagagagaagagattgagttgtttatattatctggcctcaggtgagagagtactggaatgagaagcctatgtttaaaggaaaaaaatattaaaactgggaaagtattgaacatggaaagatgtaacctatacaatgaagtacagcacaatggaagaacctaaaaattaaaaccaagaatacatatatatatttcttgatatatatatcaagaaatagcaatctatctgcaagccgaaaagtgttgcagaaggaatggaggctttgtcatcgaatacacctgctggtttaaccaaactaagattgaaagtaaaaaccttagcctgggaaacatagcgagaccccatctctacaaaaactgaaaaaaatagccaggtgtggtggtgcatgcctgtggtcccagctacttcggaggctgaggtagaaggattgcttgagcccaggaagtcgaggcagcagtgggccgtgtttgagccactgcactccagcctgggtgacagagtaagaccctgtctcagaaaaaaaaaaagaaagaatgtaaaagcgtttgaagccatttggcaaagatcatggaaaacagggcaagcaatagctacagagttccagagccatgttaaattaataaataagtaaatatttaaacattgaataccttaacaattaaaaatcatatctatctattatattgttgaatgacaaaagcctattacaggatgattctacctatatcgacatttgcatatatgcataaagcaagtctggaaggaccttcacaagcatgttaacaatggtcacctatgggtagggagatcttctttgaatttttttttttttttttttggtgcattagcgatcttgatggtttcaaatgtcatcaccagggaatgataaacgctggggcctacttagggtggagggcaataggagagtgaagattgaaaaactacctatctgatattatgctgattacctgggtgacaaaattttctgtacaccaaatccccaagacacacaattagtgcgtgtaacaaacctgcatatgaatccctttaaagtaaaatacaagttgaaaggaaaaaaataaaacctcttcaatcatctttcagatagcaatttttttcattgcttcttcagtgtacataaatattcttttacatcattcacacttctttgaacttttctgtactgtttaaatatcgcaataatgtttatgcatcctattttaaaaacaacaacaacaaattaaaaaataaaaaggagaaggaggaaggtgaggaggagaaaaagaataacaaaaaagacttgtgatcctaagcatatagacagctcagaaattgcaggaaagctgaaaaagaaaaacaagagaaaggtaaaggaagaatgatcattaataatattactaaattgggccaggcacagtggctcacgcctgtaatcccagcactttgggaggccgaggctggtggatcatttaaggtcaggcgttcgagaccagcctggccaacatggtgaaaccctgtctctactaaaaatacaaaaattagctgggcgtggtggctaatggtgggtgtaatcccagctacttgtgaggccaaggctggagaattgcttgaacccagggagcagaggttgcaatgagccaagagcacaccattgcactccagcctgggcgacaagtctctgtctcaaaaaaaaaaaaaaaaattactgaattgggctacagattcttagagctgctgatgggactttcatgaacttctaattcagagatccccaaaccagaccacacattagaattccctgagggctttttttaaatattgctctgaataaacacataaacaagcagttcccttggcccaacccatctttgacctactgaatcaaaatatctggaatgggattggggaatctgcacattgaccagcccgtgcaaggatctaaaaccagcccctggcaaccactaatgtacttctgtctctacgaatttgcctattctagatgttccatataaatggaattatatggccttttgtgactggcttctgtcacttagcatgttttcaaggtccattcatgttatagaatgtattggtacttcattcctttttatggctgaattaatatttcattgtattgatataccacattttgtctctccattcaccagttgatagatatttgagttgcttccacctgttggctattgtccacctgtttctatttctatgaacatttgttcacaagtttttgcttgaacatctaggggttttgtttgtttggttttggtttgggttttttgttttttgttttttgttttttcagagatagggtctgtcacctaggcaggagtgcagtggcaccttcttagctcactgcagccttgtattcctgggctcaactaatcctcccacctcagcctcttgagtagctagaactacagttatgatgccaccacaccctggttatttttttaatttttctgtagagacaagggtctcactatgttgcccaggctggtgttaaactcatgttctcaagcgatccttccaccccagcttcccaaagtactggggttacaggtgtgagccatcacacttggccattggatacctgtttttagttcttttgggtatatacctaagagtgaaattgctgggtcatatggtaattccacatttaacttattgagaaaccatcaaactttttagggtttttttttttttgagacggggtcttgctctgttgcccaggccagagtgcagtggcacaatcatagccccctgcagcctcaatctcctgagctccagtgatcctcccacctcagcctcccaagtagctgggactataagcacatgtcactacacctgactgactttttttttttttttttaagtagagacaagattttgctatgttgctcaggctggtcttgaactcctgagctcaagcagtcctcccacctcagtctcccaaagtgctgagattacaggcatgagccactgtgcccagaccactgtttagttttttaatgtggctactaaaaaacttgaaattacatacatggcttgcattatgtttctgtgaaagagtgctgctctggatgcttctttctgcccaagtattctactggaacttacctctcatttacctttgccctcacctgcttccaaacaagactcaaggaggaacttaatactataaaacagccaggtgcagtggctcacgcctgtaaccccagcactttgagaggccaaggcaggtggatcatttgaggccaggagttcgagaccagcctggccaacttggtgaaaccctgtctctacaaaaaatacaaaaattagctgggcatggtggtgcgcatctgtagtcccagctacttagggagctgaagcaggaggatcacttgaacctgggaggtcgaggctgcagtgagcatgattgcaccactgcactccagcttgggagacagagtgagaccctgtcacaaaaaacaacaacagaaaataaaatactacaaaacaagttacatgaaaatgaaagtctttaaaccaagagtgaaaaaaggtaggggatccaggcgcagtggctcacacctgtaatcccaacactttgggaggccaaggcatgcagatcatgagatcaagagatcaagaccatcctggccaacatggtgaaaccccatttctactaaaactacaaaagttagctgggtgtggtggtgggcgcctgtagtctcacctactcaggaggctgaggcaggagaatcgcttgaacctggaaggtggaggttgcagtgagccaagattgcaccactgcactccagcctggtgacagagccagactctgtctcaaaaaaaaaaaaaaaaaaggtgggggaggacaagtaataaaagagggtggcaagaaggatcgattttgtcagagaaactgaataacaacagctaacatttattgagtgtgtgctttgtgccaggctctgctaagtgctttctttataatctttttttttttagacggagtctccctctgtggcctaggctggagtgcagtggcacgatctcagctcactgcagcctccaaatcctgggttcaagcaagtctcctgcttcagcctcccgagtagctgggactacaggcgtccaccaccatgcccagctaatttttgtatttttagtagagacgaggtttcaccatgttggccagggtggtctcaaactcctggcctcaggtggtcgacccacctcggcctcccaaagtgctgggattacaggtgtgagccactgcacctggccagtgctttctttataatggactcttcacaccaattctatgaggtaggcagtgtggtaatgttattatacacacaaagctgataagcagcacaagattatagattcagacccaggccttactccgaaacctgagctcttggcaccctggtagccaatgcgaagatggaaacatcagctctagaaagcccctaccacagagtctggaaagacagacgatgcccagtaagttatttccctgcccattctcacactaactcagagggagaaactttttcttgatcttgagctccacagggaatttgaccctgtggctttgtacaagaaacactaatacgacatagtgggtaatgtcccccatatcaatgttaccagaaatgaagcagcatgccacatcatatgaaaacagagggcataatgttaggtcttaatttattaagtgcagttcagtcgggatccaggagcttagacagctgatagcaagctttcactttatcttttagaatgcccttttgcccttttgagtctcttgcctggaaatggtctatgacagacctctgctgccctctggtgggcagagcatgaagcacccagcaaagaattctttccagtcacatggcctcttctttgtttatattgctgaatctgtgggaagctgggcttctccacacaatcccttgaggagaaggcttaacttgtatatgaaaggaaagacacctctcccaactcaagagcaacccactgccaggatacgctctgggcctcctgccttcctcaccccacttacacgccttaccaataacatcatgcccccacgggagcagtggaggctgcaggggcccatggtattgctggggccaagggcacatatggagtctgagatttctacaaccagatggtcaagaagcagggtggagaagggaggagctgcgtggttctggtcaaagaacaagtctttctcagcctacactggagccccagacattcctgcccacgatgaggaagctgaggagcagggcgggggagaagggtggcttttcaacctggtcagaggctaatttcggggtgcaaggtgagagagtaggatcacggtccactgagacctgctcctgggtcatttccaccccaggaccaaggctgaaatggacttaaaccctgaggaaggaaaggttctaatggcttctttagttcagggtccaacagtagagaaagctgcccagaaagacctgggggtgggaatttggccccagctcagcctttaaccgccagctttcaaatttaacccttcagcactctctctcatctctatctctctctcatctccatctctatctctctatacatctatctatctctctatctctctcgacgttgctacctgtaagcaggtcagcagctccctctggaaagggtgagcctccagacgaggaggaaaggtctgcaaggagcagctctcccattgctcagcctgagctgtgcctggggctcacacctgtctctccagtcccactctccaccctgacagaacatcattctgcaatatgagaggattcccagactgttgtttttcattgaaagttctaccatactgatgatttttttttttttttttttttttgagatggagtttcgctcttgtcgcccgggctggagtgcaatggcaggatctcggctcacttggaacttccacctcccaggttcaagcaattctcctgcctcagcctcctgagtagctgggattacaggcgtgcaccaccaagcctggctaatttttgtatttttagtagagacggggtttcaccatgttggtcaggctggtcttgaactcctgacctcaagtgatctgcctgccttggcctccgaaaatgttgggattacaggcgtgagccactgcacccgaccactgctgagtgtctgtgccttctcccccttgttttcatcctggcatgtgaaattctggtttctacctggttcagaacatttatctcttttcagtacagtagacatgtcaatgttgcctgatctgaaaaagagtggctggcatgaacctcgcagtggccaacccagaaacatccatgactccaggatcatgttgcagggaactgggaagggccagtgtctgtgtgatgggctgctgaacattttggcagatccctcttccactgttttatcattttgttgtttatttaaaaactcgaatacatgcacatagtttttttaaaaatcattatatcatcacaccaccacacccggctaatttttgtatttttagtagagacagggtttctactaaaacagtcaaaggcacagctactcagaaggctgaggtaagagaattgcttgagcccaggaggcggaggttgcagtgagcggagatcgtgccactgcactccagcctaggcgacagagcaagatttcgtctcaaaaaaaaaaaaagataactagttaaataaattacccatttcatagagttctattaaaagaatatacgtgatgacatgaaagatctccaagatacacaatataatccatttcatataaataaaaaacataactttaaaaaattatcttggtcccaagaacctagggatatcccctccctaaaataaagctacctggaggggacaaactgcctgtcttggagccaagggctggccctcaaggaaggaggtccaaggtgggaacattccaacatctataagaaactagccactcggctgggcacagtggctgacgcctgtaatcccagcactttgggaggccaaggcaggcagatcacctgaggtcaggagttcaagataagcctggccatcatggtgaaaccccgtctctactaaaaatacaaaaattagtcaggcatggtagcgcgcctgtagtcccagctactcgggagactgaggcaggagaatcacttgaacctgagaggcagaggttgcagtgagccaagattgcgccactgcactccagcctgggcaacagagtgagactacatctcaaaaaaaaaaaaaaactagccactcacccttgttccaccctcaacccacattctccaataaaagaaagaaggtcagcaggtctaaaagagactgacctccacccccaccagggcttgagaaagacatctatggcaagtcactctcagtttagtttccaccctcaacccacattctccaataaaagaaagaaggtcagcaggtctaaaagagactgacctccacccccaccagggcttgagaaagacatctatggcaagtcactctcagtttagtttccacccatctcttccctagccacacccaaccaaaacccattttcagtgtcctcacaaagaatggattacccatctgtcctaaatatgtaaatcgtacaatcccacaggcacacacataccctctagctctcccatatcatctgagccctcaaatagcacaaacaagaggtcagcaccagcctttatcgggaaagagaagcaccacacacccactacccaatccagggctatttcccatgctctggtcagcggcaggaggagaagcagagcagagagggccatgagtgcccctggaaatgtcacaagccccaggatgtcaccctctcttgactgccaggaaaagcttccagaattaccaaagaagctccagacaaatcagcacagctagggcaccgggatctctgcaagtagaagaaacatcaagtcacagctgtgccctcctggcttcagctacctgaaatgttttccctccaccctaggaaagcttggcctatattgctctcaaaagtcttaaatagctccttgcttcccagacaatccaatccaaactggcactgaaggctcttattattcagatgtcaaccttgtatctcctgttataaaaaactggaattatggtcgggcacagtggctcatgcctgtaatcccagcactttgggaggccaaggtgggtggataacctgagatcaggagctcgagaccagacctggccaacatggtgaaacactgtctctactaaaaatacaaaaatcagctaggtatgatggcaggcgcctgtaaatcccagccttgggaggctgaggcaggagaattgcttgaatccaggaggcagaggttgcagtgagtcgagattgtgccattgcactccagcctgggtgacaagagtgaaactccatctcaaaaaaaaaaaaaaaaaaactggagatacgtctgttcctttacccaccctgcccccactcctcacctcccaaacatatcccacacattcccaccctgtgttcctttgccagcaatcaccagattgcctatctggcatgtccctgtgctatcctccctttgtcgcatctgcctagccttaagcacctcaatcaaatcccacctctcccacagagaccttcccagggagccacacctgggaacaggtgtaagcctgtactgtttatatgagggttctcatctgggacacaggtttgccacacctgagaacaggtgtaagcctgtactgtttgtatgagggttttcatctgggacataggttctttctctccaactagacttttcctgaccttctgaagtccccttcccagcacctaagccagtgctttgcacatagcagttgtctgttattgttgatgacaatggactgtactcacctaattcggaatcagacctcacagtccagttggggttcatggtcagttttgggggcaggactggtgggacacagaagcggccacagcctgacttgcaacatttttctccagcttgacaattctcatccatcacacagccaacaatgcacaggcccaccagaacttttggacaatcaccgccccgccctgtgggaacaacaggcacaggaaaagggacagggcatcagctctgccatctccatgttcccatcgtgaacttacacacagaggctctaggtcaatcaacccctgaccctcactagacccaactaaactggctgggaaaccatggcgctggaggatctcagaatctttaggaacccaagagacctctgagcccagagttttcaaatggtgccccaaagggagttcccaagaggtaactcagggattgacacctctgcaggtttggggtgggggtgggtgaagtgtggcaggggcaagcctcccagaccactccccctccccctatgctctggattcatagtgtcacttcttcacggtggcctcctctgccaccctagacaaggtttgatgtccctgctttgtgctcctgtagcaccctgtatgcttcctctcatcaaactttatcataatcccttatttaaaaggaatatgtctatcttgcctgatgggctataagctacatacggacaagagtctgtcctcagccttgagcactgcctgggaatctaaagggactaagatagcacaagggtcaatgattctttaatggagatccacagtgcctggcactcaaaaatatttgtttttttaaaatgttgaagaaaaaaaggcattggaacaggaatgcttttatctctgtgtgtgtgtgtgtgtgtgtgtgtgtgtgtgtgtgtgtgtgtttccagctgggcgtggtggctcacgcctgtaattccagcactttgggaggccgagacaggcagatcacgaggtcaggagttcaagaccagcctggtcaacatgatgaaaacccatctctactaaaaatacaaaaattagctgggcatggtggcgtgtgcctgtaatcccagctactcaggaggctgaggcagaagaaaccccagaggcagaggtttcagtgagccaagatcacgccactacactctagcctggggtacagaccaagactctgtctcaaaaaaaaaaaaaaagaaaaaaaagaaaaaaaaaaaaaatatatatatatatatatatatatatgtgtgtgtgtgtttccaactaagatttcatttggggcaggggagaagctttttgttaaaaattagatctgaaaatcaggatcttgggcaactccttcattttacagataaagaaatttgggctcaaaaagacgggtttgcttacctaaggtcacaaagcaaaacctcagcagaatcaagaccaaaagccacactgtctgtcttccagcccaagtagttcctactgccccacagtgccttcccccagttcttttaatgtcgacagggcccctcggccctagaagaatgggttgctttgggttgggggaccagagggacaggaaggatgagaatcctagctcctcccaggaagggaaagagaagcactcttctcaggaaacactcaaggatttcttcccaaaagagccaacatacctccctcaatgtctccgaggcaggtgcggccacagccggtgctgcagcatttatgcccctggggacaggatgcatccccatcacacagctcctcacacggaagggggtcagcgggacattcaccaccaaactctgctacataatcaaagcattggagcccagagacgctcacaatatgaaacacatttttcattgtgtcccatgtgtatgtttatatatagttatatatttatatacatatataatgtaaatatttatgtgtatcatgtatctgcaatacatctgattttttttaagacagggtctcactgtgttgcccaggccaaagtgcagtggcataatcatagctcactgcagcctcaaactcctgcattcaagggatcctcccacctcagcctcctgagtggctagaactacaggcacatgccatcatgcctggcttatttatttatttattttgtagagacagggtctcactgtatcacccaggctaaagtacagtggcacaatcatagctcattgcagcctgaaactcctgtgctcaagggatcctcccaccacagcctcctgagtacctgggactagaggcacaagccaccaggcctgggtaattttatttatttattttgtagagacagagtctcactatgttccctaggctgatatcaaactcctggctcaagtgatcctcccgcctgagcctcccaaagtgccaggattacaggcgtgagcccccccacccagcccaccctgatattttatattctagttcttatttttcctaattactaaattgctttcaggactcacagtttgaaaaacactgttcaggtctaacccactgtggccaacattctccctgaattctccctgtggcagacatttacaatggtggcctccagtgaactttacctcctgggattcaggcccttttgtagtccccttccatacctactctgggtttgaccatctgacttgctttgaccaatgggacattagcaaatgtaatgtaagcagagccttgataagcactagcatactggggcttgtccactcagaatacttcctcttggaaaccagccgccatgctataaagcagcttgaactacgctatgggatgatgagatgccccatggagacagaacctagaagagaggtcatcctggacgttgtggctccagttgagctccctgctaagctcccagatgaatgcagctaaatgaatgaccacagctacatcatgtgggtatatgaactgcccagccaagctcaggcaacctacacaactgtgagaaagagtaactatattgctttaagtcatgaagtttggagatggtttcttatgcagcaatagatactggataccaagtttattctgagaggcaacaggtccagctaaaatgatttgtttccccatactctcttgcaacaaggggtgaccacaaactaggacataaactgggaaacttttgtattcctgacacagggaatacccctttcaaactgctccctcacttctttcttcttccagtccaaagatagacattacacagagaggcagagtagccttctttcaatgaggaggcaactcagcataacgaaatggtcaagaattgcaaagaggtgttgtatgaaaggagagaaggttagcactcccctcgacaaggatggaagaggcctttgggcctgacaacatgcatatggttcaagcattgccacctactttgtggcatctaaccatcgtcttttaaaataaataaataataaaatgtaaatgtaaaaaaaaaaaaagaattgcaaaggagaaagagggaaatagtttcatccttgttagcatcatggagccaccatcccagcctcaggaattcttgttatatgagaaaaacaaacccctatatgattaattttctgttgtgtgcagccaaacacatttcctatgaaaataaactcagagaagaatcttgcccagaactacagagtgagtcagcagcaaggcaggacaacactcagcctcttgatttgcggtaaagtactttttctactacactatccttaaaacatgcaggcaactggccagggccccaggcgcaggcacacccaaagaaggccacatccaaaccaaaccaattcaccatgactcattcatcttagtgtttatttcaagcttcttaagtaaagagaaaggtgacaggcaattaaagatttcgcagaaaaccaaagcaagactggcccagtgcctctgagtaggaacaggtaagtatgattgcatacagctggctctgggaagtctgccatgatggaaaaagcaagtattggaatccaaggagaatacatgcagctaaacaacccaggcgtagtaaccctgtatcctgagattttcctgaacagcccctatttcaaatatcctgtgctactgtgagatcacatcaaaactatgtgtcctgatttttgactcagaaaatgtggtcactgtaaccaccaaatgcatctccctgcacctccccacctgcttgacaaacactgaaatccatttaacaaggaacaaaagccttctatctcacagctgagaaggctgggagtaaaaatctccctggtggaaaaacccggtgacataaacatctcataaaattatgccatgtgccctagaaactgggagtgccatacgtcccagatttcaccattttgctgagcttgaccttgagatgaccaatgccaggagctctctgctactctctgccctcgtcctcaagaccaggcatggagcacttacctctacccttttccaggccaggcttcctggaggcccagagggtcacagcacctcgcttttgaccagtgcccagcaatgccacccagtctgacaccctgccttatatgaatccctgccacgtgatccctttctctcagctctaacacctggaattaatggggcctcactacctccaagccagattatgctatcctacttaagctagacagcctttatacctttttttttttttttttttttttgagacagggtctcgctttgtcacccaggctggggtgcagtgccgcaatggtggcttactgcagcctcaaactcttgaactcctgggctcaagcaatcctccaacctcagcctcctgagtagctgaactataggcacacactaccaggcccagctaattatttttattttttatagagacagggtctcactatgttgactaggcttgttttgaccttctggcctcaagcaatcctcccgcctcagcctcccaaagtgctgacgtcacaggcatgagttaccatgcctggccctttgtacctctttatactgacctgaaatctggctgggccttttcctatccccagagaccttacaaaaacctggcggatgccattctttcaggcaggatcctctgtctttcacgatcctggctttgccatgctaggtaaggtcagttcctcataagacatgctccctaatcacctcacaattagcttaccaggaatcaggaagagaaataggaacagtagccagaatggggatgacggttccccaccctctatcagcacccatcccaagactctaagctatcaccaaaaaaggagtgaagctgaagcccaggaaatactcactcacagtctgtcctgctgcctcagctccaacctgccactatgtctgagagaaagatgccagttgttgttggaaaagtaaaatttcagcacttcttaacccaagaagggccctctgagctaacaaacttactccccttctcttgtaaatagagagacagacaactagagagagggattggcctgaggtcaatggtagcagaactgagtcacaaatccccagctctgatataaggtctcatgccctttaaaccacatcatgggcctggctcagtggctcatgcctgtaatcccagcactttgggaggccaaggtgggtgaaacacttgaggtcaggagttcaaaaccaatctggccaacatgttgaaaccctgtctctactaaaaatacaaaaaaaaaaaaaaaaagccgggtgtggtgatgggtgcctgtaatcccagctactggggaggctgaggcaggagaattgcttgaacctgggaggcagaggttgcagtgagccgagatcacaccactgcactccatcctgggtgacagagcgagactccatctcaaacacacacatagacacacacacacacacatcatcatgatcccctacactgcagcaaggatcacacaaaaaccaagaagcactgggactcactctgcccagttccaccaaaagagaagatccagtggtagatagttttagaggttaggaaaagttatccaccagtgtgtaggcagtcctcaagaccacttacttccaggttcagtgattcattagcaggactcagcgtatagtcatacccatggctatgatttattacagcaaaaggatacaaagaaaaatcatcaaagggaaaagtccagaggaaatcaggtgctgattttcaagagtcctcccggtagagtcacaggatgcacttaattcttccagcatggaattatgacatgtgtgaagtgttttctaccagggaaactcattagacactcactgtgaaagttctctactgggggctggtcacttaggcaccctctgcctagcacgtaccaagattccagactctcagaaggaaagcagatgttcagcctaaaccacaatgtttacacaaacagtttaggcacagtgaaccactcttatcagttagagtagtacaaatacccacaaaatccaagttcccagaagccagccaaggcccagccttgccagcaagcctttttaagaagagcggtctcaggcttgttatgttaactcttttctgtacaacctgcagtgaggttttagaaaagggtcagccagacacccagggaggccatgccatcagcccacgtaaaagataatacatatatgttaataagcaaaacagagggtcacaggggatctggagtggtcaggtttcatacagtggggaggtgagccatgaggaggcccaagaagacaactgtcaggccagaatcagaatcttcactccaaaacctcttcccccaggttgtccctgtctcagtaaagaacaccaccatcacccaactgctcaagctgaatatctaccacccttcttgataccccgtctccctcaatgcctgcagccacttacttgttcacccagtcccattaattctaccttcacaaacatgtaagccttccatttttctttttcattgttattggttttttgggggcttttttgttttggattttttttttcttttttttgagatggagtttcgctcttgttgcccaggctggagtgcagtggtgcgatctcggctctctgcaacctccacctcctaggttcaagcgattctcctgcctcagcctcccgagtagctgggattacagacgcccaccatcatgcccggctaatttttgtatttttagtagagatggggtttcaccatgttggccaggctggtctcaaactcctgacctcgtgatctgcccgcattggcctcccaaagtgctgggattacaggcatcagccactgcgttcggccgccttccatttttctatgtctgcagtatctccaacccagtctaagccccgatcatctctcccagcctgccacaatagcctcctaactggtcttccatcttctacacttgcccccatccattcttcatatactggcagagtggtctttttaaaatgaaaactggacaaggcctctcctgcttttaaaccccctcaaaggcttcctattgcacttagaataaagcctaagagagaagccctgaagacccccgaaagtctgggccctgcctacctctccaacctcaaatgaaagcagcctccttctctcttcttcctttaccttcaaagcactcatgactcatcatcatcttggggttattatgtatttgttttcttgattatttcctgtctgtcacactatatgagcaagccccagggtggcaaggaccacggctgccttcctcaccactgcagacccacatgccaggtagggtagccacactcaatatacagtgaatacatgaataagtgggtgagtaaacggataggtcaggcatcagataggtggggaggcagagaaggggcggaccagaacacagaggtacttggcatgaccatatgagctctcttgagcattatctggcaggtttactgcagacttttttaaatgcatttctggccggacacagtggtttgtgcctgtagtcccagtttctcagggaactaaggcagaaggatcacctgagcccaggaggttgaggctgcagtgggctgagatcacaccactgcactccagcctgggtgatagagtgagaccttgtcccagataaataaataaataaaatgcatttcttctcaactgcattatcactctgggagctaaacatccttatccccattttacagataataaaagtgagattcagagaaatgaagggacttgcccaaggccacacagcaagcaagcagaagagccaggattcagacccatgttcagactagaacagtgtcatgagagcaggacccaatgtctgcccttgccctcaggcaacctgactgaacctccactttgccaaacagaccagcgctggctatggtaaacctctggcaatgtcagagcttaaggaaagcgaaatttttcatagccctggaaggagagcttcctgtagagttgggtatagcaaccagtcctgttgggtgagtagcctagccctcccctagggctggagctatacaaaagtagttaactaccaatgcagtagccagtatcacctcccaccaggctaggaaccccgctcagcccagcaggctctgggacatctgcgggagatcactattctagcctgcctgccaagctccagtggaaaaggaagccctatctgggctggccaggggccagagcagctcacaaaggtactgtgcctgggtgccagcctcgcccttagcccctacaattcagccctcagcttcaaacactgggaagattgtaccaagccctacatgccagcagtcagtgacctgcctgagacagattcccaggctggttccagagctgggcctcaagagtcctggcaaggagaacaaccttccattctctctaatgggcaggctgcccaagatagctgcctaagccgggcacagacagacccaatgggtaccagcaaggggcctcctacctggagaggtttgactggaaggaaaaaggttgtcacatgttacagggcttcaggttctgagaggaagtgatcagggaagaagaaaaccatcctggttttgaataaaggggctggtgagaaattgtactcctgctgggcatggtggctcacacctgtaatcccagcactttgggaggccaaggccggtggatcacctgaagtcaggagtttgagaccagcctgaccaacatgctgaaaag[136 bp omitted]cactccagcctgggcaacaatagcgaaactcagtctcaaaaaaaagaaattgtacttctgacccaggccacttaggaggcaagaggaaggaagttaatatatactgagggcaaaacactttacataatttgaataattacaacaagccttcgaggtttattcttcccaccttacagagaagggaactaaggctcaaaattacttgcccagggacctgctggccagtaactggcaaacctcaggcttgaacccaggactccgacaacccaaacctaggattttccactctaacatccaccacatgcactcagataagagaatgattccagttcctttagaaaacataatgagaaatattcaaaacagcagagaagaaaataaaatacctaggcataaatttatggagaaatattttaacactataaaacaccctgaaatatgcaaaatacacttgatcaacagggaaggcataggattcaacataggccaggcacagtggctcatgcctgtaatcccagcattttgggagccaaggtgggcagatcacctgaggtcaggagttcgagatcagcctgaccaacatggcaaaaccccatctcttctaaaaatacaaaaattagctgagcatggtggcacacgcctgcaatcccagctactcaggaggctgacgcacaagaatgacttgaatgtgggagcagaggttgcagtgagccaagatcacgccactgtactcctgcctgggcgacagcctgtctcaaaaaaaaaaaaaaaaaagaacatttcagtaccataaaacagggtaagaaaaaaaaaagattcaacattataataacagcagttctccttaagctaatttaatttatatatctaacatcactccagtgaacgtagtcttggtatttgggaatgatggaagaaaaatagataatattataataaaatatatttggaagcacaaataagcaaaagtagccatgaaaatcgtgaaacaagaggaaaataggaaggggttagacatagaagacatgccatcaatttctaatatgttttaggggcctctcaagggaatggagaaggaatagagcagagagccctgtcacttctacctccaaattttctcaactatgtcacctttctccatccccgctgctacctccctagtctcacgggtctacatcctcatctgccttcattctctccctcccatttctactctaaccgtactagctttctttccatttctcaaatgtggcaagctcctagtcatcttaaggcctctgtgtgtgcttctctctctccctggaatgtccatcgcacccttcacctggctaacttcaaatcgctctccaggttgcagcttaaatgtcactccacacatgccatcctcaaccacccaaaccaatgtgagttctcagccgggcacggtggctcacgccagcccttgggaggccaaggcaggtggatcacttgaggccaggagtgtgagaccaacccagccaacatggtgagaccccatctctcctaaaaatacaaaaattagccaggtggggtggcatgtgcctgtaatcccagctactcgggaggctgaggcaggagaattgcttgagcccagaaggtaggtggaggttgtagtgaaacaagatcgtgccactgcactccagcctgagcaacagagcaagactgtcaaaaaaataaaaacaaaaataaaagtgagttctccgctttactctgtctctcagcaccctttaattttccttccctgtccttatcagagtttgaaattatatatttatttacatgcttatttgttaaacctctttctctgccatgagactatgagctccatgaaagcgggcatgggatctaccgtattttccacaatataccaggagcccgtcactggatctcgcaaacagtacacattcaataaatacttgttgaagaaatgaatgcataaatggataattaggtcactgggactctgcaaaagggagaatgaatctctttcaaatacctctctaccaggaccagaatgaaaaagaatctgtttcccacaggagacagccccgccgtgtgtgtacatagggaacataagaatctcaggagcaggccaggcatggtggctcacgcctgtaatcccagtactttgggaggctgaggtgggtggatcacgaggtcaggagattgagaccatcctggctaacatgacgaaaacccgtctctactaaaaatacaaaaaattagccgggtgtggtggcacatgcctgtagtcccagataatagggaggctgaggcaggagaattgcttgaacctgggaggcagaggttgcagtgagccaagatcacaccactgcactctagcctgggagacagagcaagactctctctcaaaaaaaaaaaaaaaaaaaaaaaaagaatctcgggagcaaatgagtggggaaatgtgtgccaccttccataggcatcaagattcttttttttttttctgtctctgcagattctcaggataagattttttaacagagaatattgcaactgattatgggaactgggaattacccagtggttttcttttttcttttttttttttttttttttttttttgagacagagtctcgctctgtcacccaggctggagtgcagtggcataatctcggcccactgcaagctccgccttctgggttcacgccattctcctgcttcagcctcctaagtagctgggactacaggcacccgccaccacgcccggctactttttttgtatttttagtagagacggagtttcgccgtgttagccaggatggtctcgatctcctgacctcgtgatccgcccgccttggcctcccaaagtgctgggattccaggcatgagccaccacacctggctactcaaccgttttcaaagcagtctgcaaatgagggtaagttgaggctgcccttctggcaccctccctctgcctgcccaggctacataccacaaatgattatggcttgtgcaccctttgtatatcttttttttttaaggtcttagaatatagcagcaaagtaaaaccaacaagctgatatgtgcatatttgagaaataaacaagcagaccaaacagaccatgaggtgtggggacagcgtttcttacccagcttctgtttagagattgggactacacagctcttgttgcagccaagcgtgcagcatttctttacacctggacatgtctcatcagtgatgcaccttttcaaacaggattgtttccgaataaccctagggcaatctcttttcctccctgtagcaaaaagggagacagcaaagaaaagagaaaataggccgagcgccatggctcacacctgtaatcccagcactttgggaggccaaggcgggtggatcacctgaggtagggagttcgagaacagcctggccaacatggagaaacccc[135 bp omitted]cattctagtctgagcaacaagagcgaaactccgtctcaaaaaaaaaagagagagagagagagaaaatagtgcctggcaacacccacgggcacagcagaagggaaaaacagaaaaaggaagtcctgagatttatttaagcctctcaaccctggtgctaagacaaagagacaataataacaacaatagtaatagcaaatatttactgtaacatttactgacgtttaccttgtgccatgaacatcttatttgatcctcacaattatccccattttatagatgaggaaactgaggctaaaagcttaagatttataaagagctaaggcttaaggcttaaaaaggtctgcttggctctagggtctactctcttaatcattatcttacacagccttccctttacaactcttccctccagccttcacaggaactttgagtccaaagtaaaagacatagataatcaatggtgcgctctttcctgatggaaggcaaacaactgggggcactgaataattaaaggaggagggaccctaaaagagtaaagaagaagtactctaggcaagggagacttccagaggcaacctagaaggtgggaagctctctacttccatctatcccagaggcaatgtcagagagtatgcccagattttgcccctcatgccaacatacccttaggaatgtctcggcagatccgaccacagcctgtggtgcagcacttctgttcagccggacacaattcatcaccctggcacagctctttgcatgggttcttatggggagggcattctccctcttttgctgcaaaagatactatttgagtttggggtaactagccaggcctcagaaatggggaatggaccttcagcccctccaggcatctctatccaaaatatttctgcaccactgcactctagcctgggtgacagaatgagaccctgtctcttaaaaaaaaaaaaaaattctggctgggcacgatagctcatgcctgtaatcccagcactttgggaggccgaggcgggcggatcatgaggtcaggagatcgagatcatcctggctaacacagtgaaaccccatctctactaaaaatacaaaaaattagctgggcgtggcggcgggcacctgtagtcccagctactcgggaggctgaggcaggagaatggcgtgaacctgggaggtggagtttgcagtgagctgagatcacgccactgcactccagcctgggtgacagagtgagactccatctcaaaaaaaaaaaaaaaattctgcaaccaccttcccctcctcatacacaaatactaacatatatccaccactgctaaaggagcagccatcctgcagataacgagagagaaagggtgggatgatcctgttctcatttaatgagttctagggaaaagctagaacctctagtaagcccaactggaagtcctatctccttgtccagagagggtaaagaaagccaggaagaatgacccaggccatcctgagaatctattcatccagtcctgtcctatagagatgatcatctccacttacaagcaaccttgctctgggagaaggcaggggatgagttctcctctcctctagtcactttctgttactgttggccagggatcccaaatgatagctcaccatgttctcctgcagttatccaggattccagagacccaagagcaagaagtgccttcagaagaaagaggcagcttaacatcatgatgatgctgagagttgggacaagagctcagttcaggctagaggtgtacaccttgcccagagtatcagctgaggtatgagcaggactagggatggccccaaacccagtcccaaaaccttccctttcacaatactccccaagaatatcttctcctgacaagaagaagagggattggctgctggagtgtgggaaaattcctggcactaccaaaggggacctgtgatgggaggatcaaattctgtaagcaatatacacaatattcctggatgatgagaaacctagtgggtggctggaaaaatggaggggtggccattggaaaaagaatcaaagagagccctaaagggcattggaaggacatggctttagcccaaataacagagggagggattcacgacactacttaatggccaaagctaataacataaccaagcataataaaattgtggctcctgttcatcctagcaaccaagaaaatacagaatggaacagaccactcagaaactatcaaataggccaaggcgggcagatcacctgaggtcaggagtttgagaccagcctggccaacatggcgaaaccctgtctctactaaaaatacaaaaatcagctgggcatgctggtgcatgcctgtaatcccagctacgtgggaggctgaggcaggagaatagcttgaacccaggaggcagaggttgcagtgagtggagatcatgccactgcactccagcttgggtaacagagtgagactctgtctcaaaaaaaaaaaaaagagagaaaagaaactatcaaaaacctacagaaaagcagtagttgagtttgttaagaactaatgaaaagcaccaaacacctacatctttgtccctctaacccacacaggccattcttggactgtatgaagtctagctggcagaacccaagagaagttgctatgtatgactcaaatagtctgcccacatatacctcctttatttcttttttctccatttctttttttctttatctgtcctggtcatgcctttggttagctgtgatacctaatggtgtccactggcactgcttagtcctatgggcaggtacaaggtaaaacctccttaataggatcaaaaagtttggagccaggaagtcgcccttatggttagaaggctgatgttggctcatggagataattaacatttgatgatgacctcatatgtgcctaatatgcttttttttttttttttttttttttttttgagacagagtctccctctgtcccccaggctggaatgcagtggcgcgatctcggcataattaacatttgatgatgacctaacatgtgcctaatgtgctttttttttttttttttttgagacagtctccctctgtcgcccaggctggagtgcagtggcgtgatctcggctcactgcaacctccgcctcctgggttcaagagactctcctgcctcagcctcccgagtagctgggattacaggtgcccaccaccacgcccggctaatttttatatttttagtagagacggggtttcgccatgttggccaggctggtctcgaactcctgatggcaagtgatcctcccgcctcggcctcccaaagtgctgggattacaggcgtgagccaccgcccctggccgagcatattaaaatctagttttcaaaaactgaactgcaggcgccgctgtaccaaacgcttccctctgctccccaaccccagcctacagaaaactggtcccttcctcctaccccgcagtcatccccaggccttggcccagcgggaaacatcccttgactgaaccgccactgaacacccacactgcacaatcgaggcgcagccctcccgagaggaagccccaacgacctccacctacaaggcctctaagtgtaactgtcctgggcgaggcgcggcggttcggttcccatggtaaccccgcagctccagcgtcgcgcttccgggcggacgagcagcgcgctccagtgacgtcacggcgccactttccggccggtgacagagtccagcggagttgtgggggccgggggcgccatgggagccactggcgacgccgagcagccgcggggacctagcggggccgagaggggcggcttggagctgggggatgcgggcgcagcggggcagctggttcttacggtgagggcgcccccggtgaggtctgggctcaggccgggcacggcctcggggctcctgggaccctggcccgcgggcgagagaacgcggaggctggagctgcagagggggttggcgttttcgcagcccgacgacctggatttaaattctggtgccgccctcctagctaggtgacgtgggccatctctgtcaaccccctgagtcccaggatcctcttctataaaatggaaatgattagtacctgtctcataaaacttgttgtgggatgggaagataaaggcgggtacaacgccccggacatcacctgacacagagttgaccctcggtaaatactgcttcccttcctcctgccgtgccagaaggcagggtcgggacttttaaggcaggaaacttcctcagttcctcttttgtggaggaggccttacaactatcgtcccaccccaaggcgggagagatggtgacggatctgagaagcagggatgtccaggtttaacttcatacccaccctccacctccaccccaccccagtgtcacaggccgcagtgacatttgttccgttggtccccacagaacccttggaacataatgataaagcaccggcaggtgcagcggaggggccgccgctcacagatgacaacaaggtaaggctggccctgcatggggcttatatcccagccactggcttgcatggcagatttgggatccccagtgcacaaggctatggagatctacagccggtagaaagagcacaggactgaggaagaggagactccgattctgtaactctgtgtgatcttgaactagtcaagtcacttccttctctgaactcacgtacaaaatggggaagggcacaggagatgggttgtggaataaacaatacctaagatccctcacattcactggctctgtggttgagggctctaaagaggtcagttagcatggagtttaagagaacaggctctggagtcagacaactgtgttctcatcaacagactctgatgagcccgttttctcaactataaagagggattaatagtatgcatgtcagggaagggagagagcacaaggtgggcctttgggatgctgatagtggtgaaatggatgttcactataattactcattaaagtgtatagacttttctgtataagtattatatttcataaaaacactttgggccgggcgcggtggctcacgcctgtaatcccagcactttgggaggctgaggtgggtggatcacctgaggtcgggacttccagaacagcctgaccaacatggagaaaccccgtctctactaaaaataacaaaaaattggccgggcgcggtggctcacgcctgtaatcccagcactttgggagtctgaggcgggcagatcacctgaggttgggagttcgagaccagcctgaccaaaatggagaaacccggtctctactaaaaatacaaaaattagccgggcgtggtggtgcacacctgtaatcccagctactaaggaggctgaggcaggagaattgcttgaacccaggaggcagaggttgcagtgagccaaaaccacgccactgcactccagcctgggcaacagagtgagactccgtctcaaaaaaaaaaactttgaaaataatatgcacttcatagagttattatgagaaagaaataaagtcatgcctctgtgatttgcacaaaatctgagcatgtagctagttttcaataaaagctgtctagtattgttaaggaattctatgtccataattaactggggaggctgggaaagaatatgtttgggacatgccccctcaccctgtctccctcctgaatgcagtttcacagatcctgccatctccatggatctcctccgagctgtcctgcagcccagcatcaacgaggagatccagactgtcttcaacaagtacatgaaggtgagagggacacaggataaaaaataacaggagaaagactcatgaggagcccagtccttgcctgcatcaccagtctgtctctttcctacatacagatatctaaagttttcctttcttgttgtttttgttttgttttgttttgtgtttttgagacagattctcactctgtcacccaggctggagtgcagtggcacaatatcgattcaccgcaacctccacttcccaggttccagcgattctcatgcctcagcctccctagtggctgggattacaggtgcccaccaccttgcagggctaatttttgtatttttagtagagacggggtttcactgttggccaggctggtctcgaactcctgacctcaaatgatttgcctgccttggcctcccaaagtgctgggattataggtgtgagccagggcacctggtcagttttcaaatttttaatcccccaagaattttattccctccttgagggtaattcagataccttttttttttaaaatctgcccttgtcacgcacgtggttttttttgctgacctcttataaggatgaagtgacttaaatgtactgtgctgagcactgtgctccagacataacaagtgtccaataagtattcttattagttgtttaataatataaccattattggggccatgcacagtggctcacacctgcaaccccagcactttgggaggccgaggcaggatcacttgaggccaggagtttgagaacagcctgggcaacacagtgggacctcatctctactaaaaaaaaaaaaaaatttttttttttttttttgagacagagtctcactctgtcgccaggctggagtgcagtggcacggtcttggctcactgcaacctccgcctcctgggttcaagcagttctctgccccagcctcccaagtagctgggattacaggcatccgccaccacgcccagctaattttttgtatttttagtagagacggggtttcaccgtgttagccaggatggtctcgatctcctgacctcgtgatccgcccacctcggcctcgcaaagtgctgggattacaggtgtgagccaccgcgcccgtcctgattttttgcactatttacacctcaatctgttgggcacccccacgattatatccgtaagagggggaataaagggaggaggtcaagcctgaaatgtgaatctaaatctggctgatcccaaagccctgctcataatcacttttcccttctgtatgaagctaggataaagacttattttatattcagtttccttcaggttgatgcacattaacaggactctgaccttgtcctctgttgtgctcccctagttcttccagaaggcagcactgaacgtgcgagacaatgttggggaggaggtggacgcagagcagctgatccaggaagcctgtcggagctgcctggagcaggtgagaccaaaggggacaagagatgcaggcacaaggtttagctctcgagcctctgataagaaatgcgatcttaagccggacgtggtggctcacacatgtaatcccagcactgtgggaggccaaggtgggcagatcactcaaggccaggagtttgagaccagcttgggcaacgtggctaaaccccatctctacaaacaatacgaaaattagctgggcatggtggtgcacgcctataatcctagctgcttgggagccataggcacgagaatcgcttgaacctgggagacagaggttgcggtgagccgagatggcaccactacactccagcctgggtgaaagagcaagattctgtctcaaaaacaaacaaaaaaagaaatgtgatcttgtcatcagtggtattttggggaatgcccagcaagccacatattgagataggcttgaggctgttgctgacagggaaaggaagggaagtagctactatatgtcaggtaccaggataaatgcattatttttttttatgtctcagaagaaactatgtacagaagatatcttttaattactattttatagatgaagaaattgtgacttagcaaactcatagaagcagagagtagaatggcagtagctggaggggagaagtggggggatgttaatcaaagggtacaaacttttagttataagatgaacaagttctgggcaatctgatgtacagcatgatgactatagtttatctctattgtttacttgaaatttgctaagaccatagatcttaagtgtccacacacaaaatggtagtggtggatgtgttgattgatttcattgtggtaatcatttcactatgtatatctatgtcaattcatcacattgtacaccttgaatatataccatttctgtttatcaattatacatcaatagagctagaaaaaaatttttaaaagcaaagcaaaaaaaaaaaaagaaatggcttaagacacataataattagaatagctaagatctgtctcacccctgcaggtgcgtggtggatcaagttatcatggccccatttggtatcatggggatgagcaccctgctgcctccctgcctctctggtgtggtcaggaagcatgacatcaggtctataaatgactgttcccaagatagtagagaacctgtttacatgtgtcagctgctgttattaggaggaattgttgccatcaccattttatagggagacatcaggaaaggtcgccaatagtcgctggctcactttctcacctcctattcattctcttcactttgttttcgcttcagtccccactacttcactggaacccctcttgtcggggtcgctagtaacttccgtgttgtcaaaccctctggtccctaactgtcctcaacttactcagcttctcagtgacatctgtcacaatggatcatttcgcgtttcttggaatgctcctctgttggctagagtgccttgactttgctccaacctcattgcctactcttctctctcaccccccgcctctaactgttggtgccttcccaagttcagtcctcaaaccccttctctttcatggctcactgttttcataggtgttttcatctagtcctgtggcttggaagccaattcagccgctcataattcacacatttatatctcagtccagagttacattcaccgttacccagttccaatccactcttctcacagcagccagactgatctccgtaaagatgaattagatcatgtcactccccattttaaaaacccttcagtgactttcctgttgcagggagaataaagtcttaatgccttaccatgatcctgctgggaaaactggctagccatatgtagaaagccgaaactggatcccttccttacaccttatacaaaaattaattcaagatggattaaagacttaaatgttagacctaaaaccataaaaaccctagaagaaaacctaggcaataccattcaggacataggcatgggcaaggacttcatgactaaaacaccaaaaggaatggcaacaaaagccaaaattgacaaatgggatctaattaaactaaagagcttctgcacagcaaaagaaatgaccatcagagtgaacaggcaacctacagaatgggagaaaatttttgcaatctactcatctgacaaagggctaatacccagaatctacaatgaactctaacaaatttacaagaaaaaaacaagcaaccccatcaacaagtggccaaaggacatgaacagacactcctcaaaagaagacatttatgcagccaaaagacacatgaaaaaatgctcatcatcactggccatcagagaaatgcaaatcaaaaccacaatgagataccatcttacaccagttagaatggtgatcattaaaaagtcaggaaacaacaggtgctggagaggatgtggagaaataggaacacttttacactgttggtgggaccgtaaactagttcaaccattgtggaagtcagtgtggcgattcctcagggatctagaactagaaataccatttgacccagccatcccattactgggtatatacccaaaggaatataaatcatgctgctataaagacacatgcacacatatgtttattgtggcactattcacaatagcaaagacttggaaccaacccaaatgtccaacaatgatagactggattaagaaaatgtggcacatatataccatggaatactatgcagccataaaaagtgatgagttcatgtcctttttagggacatggatgaagctggaaaccatcattctcagcaaactatcacaaggacaaaaaaccaaacaccgcatgttctcactcatgggtgggaattgaacaatgagaacacatggacacaggaaagggaacatcagacaccggggcctgtcgtggggttgggggaggggggagggatagcattaggagatatacctaatgttaaatgacgagttactgggtgcagcacaccaacaaggcacatgtatacatatgtaacaaacctgcatgttgtgcacatgtaccctaaaacttaaagtataatttaaaaaaaaatgccttaccatgacccacagagcctaccctcgactggcttctgcctgcttctttaacttcatttcatctcacctcttttttattgactatactctggctgttctgaactcctttctgctcctccagcacaagcttaggccatttcacttgctgttcttagtacctggggtactctacccttaactctataaagccggctccttcttttcttcagatcttagtttaaatatcagagaggtcttcccctcgcactcctacctctgctaaaatcttgagctttacaagagttgaggcctaatcttgttcaccactgtattcccagccctggaatatgactcttagtatgtgtacagagtttgctgaattattgagtaaatgaaggaacaaacaaatgataaatgaacaaacaagcttcctgctctaatagaacttaacagcctacttaagcagacaggtgtgaattagattaccaacaaatgtgtgcataattacacattgagacttgatcacccttcactggaaagggacaaagtttggaggagaagagcatgaatccaattatggattagcagctttgagccatccaagcatagacatggggcagactatttggtatataagtctagagctcagaggataaccttttgtctacagttgaattatggaatcgtggtttatagatgttaattgaagctgtgagaataggtgagagcagatagaatatgtaatgagagaggatagggaaaagaaccagattgagaaggaaaagccagcaaagaaggctaagaaagaacggccagagaagtagaaggaacacaggaagtgtggccacaggagcctgtagaaaagagtgtttccagaagggggagccctcagcactgtcaaatgccactggcagaggtcgggtgaacccaattctccacctgctgcaccatctcccctctgcccattccatccttttctttgtcaaatgagccaggtgttcccacctttgagcttctgcactcctccctgctgctgaaacacttctgcccagctttttttacagcctccttcacatctcaactcagaggccaccttctgagcaaggccttccctggccattcccgcaaagtagcccttcccctctggtggttctctgtcacatctgcctgggtttttttctttttttctcacagcatctatcatgatccacagttaccttgtttgtttctgtgcttattatccagatcacccacaaactataagctccacaagagcttgtcctagttactgctgtgtccacagcacttaggtcccaggtactcagtatttattaaaagaaaaacagcaggccaggcgcactggctcacgcctgtaatcccaacactttgggaggctgaggcgggcagatcacgaggtcagaagtgtgagactagcctagccaacgtgataaaaccccatctctactaaaaataccaaaaaaaaaaaaaaaaaaaattagctgggtgtggttgcacgcctgtaatcccagctactcaggaggcagaggcaggagaattgcttgaacctgggaggcggagattgcagacagccgagatcgcaccactgtactccagtctgggcaacagagcaagattccatgtcaaaaaaaaaaagaaaaaagaaaaacagcagcttactgaggagtatgtgttatactaatgtatttagtttgaaaaaacatacagtatgtatttacatgggaaaagcaaggaagaatttacattgaaacattaatagtagtttatgtaatgagattccaggtttttcttattttgcttttttacattttttaatttttccagccatgatcattaattcaagtttttttaaaaatagatatctatttctatgcatataaatatatatatgtgtgtggctgggcgtggtggctcatgcctgtaatcgcagcactttgggaggccaaggcaggtggatcacctgaggttaagagttcgagaccagcctggccaacatggtgaaaccccgtttctaataaaaatacaaaaattagctgggcatggtggtgggcacctgtaatctcagctgcctgggaggctgaggcaggagaatcgcttgaacccaggaggcggaggttgcagtgagctgagatagcaccactgcactccagcctgggcgacaagagtgaaactccatctcaatttaaaaaaaaaaaaaaaatatatatatatatatatatatatatatatatatatatatatatatatatatatatatatatttggaagtgggccgatcacttgaggtcaggagttcaagaccagcctgtccaacatggtgaaatcccgtctcttccaaaaatacaaaaattagctgggtatggtggcgcacccctgtagtcccagctactttggaggctgaggcatgagaatcacttgaacccaggagatggaggttgcagagagccaagatggtgctgctgcactccagcctgagcaacagagcaagactctgtctccaaaaaaaaaaaaggaagtaggtagggtgtgcttacccaccaaaatagtgactggtaacacttggtctttttcccttcaggctaaactgctcttttcagatggagaaaaagtaatacccagattgacccatgagcttccaggaataaaggtcagagtcactgtgttctcgggtattggagcgggaggtccttcaggctgggaggcaagtgaaatatgtgggcccagggaggttccatgtacttccatttgtaggaccaggcccacacagcatcatgctggatgggcttctttggcctgggtcagagcggggctggagagctgtagtccagggctgtcttctgcaactccagaagacctgcagctcccaggcactggccttccactgactcccttcccttttcttttagcgtggccgtcaggcagaagaagaatgtgcccatcgaggaagcccccttcctaaaaaggtaaaccatttccttgttttgttttctggctgaaaaaaggcttgtcaggccgggtgtggtggctcacacctgtaatcccaacactttgggaggccaagcggggaggatcacttgagctcaggagttttgagaccagtctgggtaacatagtgagaccctgtctctaaaataaaaaaaaaattagccaggcatgctggcacatttctgtcgtcctagctacatgagaggctgcagtgggaggatcacctgagcccaggagttcaaggctgtagtgagctatgatcatgccactgcactccaggctgagtaacagagtaagaccctgtctctcaaaaaaggctcttcactccgcaaggtactgggcttcctcaaagcccttttgagccttcctagacatgagaggcagtttttctccctgtccctgtcaaacatcatttgatctctttggaaaaccatctctgccaagtgaccctggacctgccaatggggtatggggagtaaccacagggtcagacctctgacagctgttttttgtggcagaggaaaggacggcctcctggacacatcctgtcaagcgaccgggcagccgccggcatggtgtgagtagggaccaacagtgtggtgagagcataggggagcagacggagagaggggccctgaaggaaaagagtccagggttctgtgcctgtcaaaatcagatccatcagcttaagtcatcgtggaggggggttatcctggttggaggggtgaggaaggagggtagtgaggaggaaattgttttaccccctgaacggtttggcccagcttgatgaaagattaaactccagaggtttgtcattgttagtatatattggatgcttatgactggtctaaatacgttacatactttaccttttaatctttatagccaccctgtaaagaagatatcattaatttttcagataacagactcagagaattacttgcctaatgtcatatcgttaacattgcctccaagacggtcattttcaaatatatatttttttaagacttaatttttttagagcagttttaggttcacagcaaaattgagaggaaggtacagacatatcccgtatactccctgaccctacacatgcacagcctcccccattatcgacatcaggcaccagagtggtacatttgttacatttgatgagcctactttgactcgtcttgatcctcagagtgcatagtttccatgagggttcactcttggtattgtacatgaacttagacaaatgcatagtgacaggcatccaccattctagtatcacactgagtgctttcagtgccctaaaaatcctctgtgttctgcctgttcatccttccttccccctcaaccaacccccaaccccactttttaaaaaaaattctgaagcagcagaatctttttcaaacaaaactttacatgggagcccagtatttaaatcaaataaagccacactggtctggttcaggggcgtggggttagtttggaacagctggcttagtagatgggctagtattaactgtcataccttagatgtgtctcctacacgaagcagttttattcctcacaaacacaagataggtagggcagttgctgtttttgtctcttttgacagatgagaaaactgccactcagaggttcttggagttgctcatgccactatgtaagagcagagctagtgctagaatggcttctagtccagtgctttttttccctttgttcctcctcttatgtgtcaccacgaaggaggatgtccagggctaaagtgagagtgtgtgaggaactcctaccaccaccagcaagctggcatttagtcctaggtctcaccttggagaattcacctttattctttccttccaagcagatggaaaccaaaatcctgtgaaccaattcgccgggaaggccccaaggtatgattatgtgagcatggcagagatcacgatcccaggagatagtcccactatctctaggacccaccatgagggaaaggggcagggggcgaagggtgcatgcacaccattccagagccatctgcccctctccacctccagccacactggcctcagagaggatcctgtgtaggaattggagttagaggcaaaacaaagagagggcttgagtctttgctgaagccttctccttataggagttagtggtcactaatactgattcaatacttagtatgtaacgggcagtgtcctaaatcttttgtgtagaccatctcatttaatctttataacaaacttatgagatcaattctgtgaaccattctataaatgaggcgtttccttttctgccagcttccctgtgggcataaattattttattcagttgtcttatacacttaatgcacttaagacttgcccaaagtcacataactcgtaagtgatcgagctgagtctcaaacccaagacccgctgacaccagagtctgtgctctcaaccattagcctctgttgcctccctctctctcctgagttcttcctcagcagtgacttatataaatggttgttccccagaattctctccttggcccacttctccatctaaagtaactctctggataatctaaaacatatactcttatggtttcagggaccaccatgttctaaaactcccatacctctttgtccatcccatgcctctttctactttaaaacttgtttatcctactatctgcttgaccactctgctggaagtttcataggcatttcagactcagcatatccaaacatgaaattagaatctttcctcacagcccttctttacattcgttatcttaatcatctttgcctcctcctcctcttccttacctccctacacccagtcgagtcctggacaattcttcctcttaaatatattgcagttcctatttccttctgttcatccttactgctgccctagctcaggcccttagcagctttccaactgctttatcacagcggcctctaaactgctctccctgcctgtagtcttgccccttcaaatccattatccacattgctagaagactaagctatctttaaaggaaatctgactctcactccctgtttagaggccttcagcgattccccattgcctacagaagaaataaaatgcagtcccctgaacataacctcctaagacctccaactcctctgtgtttctctctccagccccatcagctgccactccctaatttgtactctctctgttagcagcacagaattactagtagtttctccagcaggccaagctgcctctcacctgtctttgctcatgctgccccctgtctggaatgcccttgttcctgaccccctttaccccaacttgtgctcaccctttcagaattaacttgggaaatgcctctctaaggaagccttcctggctggaccctcccctcggcagccctcagaccctgcactcacttgtgtccttgcctcatcgcacaatggtgtaattatctgtacatatgttggtggcatcctagaaaacagagactgtatcttattcatctctttatccccagtatctagcacagacagggcctagcatattgtgagtactcagtgtcttgggtcaactgttgattaaataatagacaaggggaagggttagaaaagggtagggggaggagtgtttctgtcctacccatcagattaaacttcaccctcacgagcttctctattttttgcacagtgggacccagctcgcctgaatgaatctaccacctttgtgttgggatctcgagccaacaagtaagtttaagagctttggcactgattgaggaaacagctcaggagttcactagtaggactacactttctggaatcttgaccacttggcttttacttttcagagccctggggatggggggcaccagaggaagaatctacatcaagcacccacacctctttaaggtaggtgactgctgggaggaaagcaggccattgcattgggagtagactgggaactccactcagcacagagaagcttagaacaaacactgatcttggagtcaggacatctgggttctagttgtgcctctgccattcacctttccctttcatgatttactcaacacctctgtgcctcagtaataacagctactttgcttgcatgcttactgggtgccaaacacagttttaaatcccacacttatattatcttaaaaaataagtattgccatccttatttcacaaatttgaaacaatcagaggttgagaaaggctgagtgacttgcccacagttattcagctagaaatggtgagtcaggattcaaatccaggtctgtcctcaccaaagcctgagctcttaaccactaccatatttggttgtctgtaaattagagtttgggccaggtgcgtgagctcacacctgtaatcccagcactttgggaggccaaggcgggtggatcacctgaagttgggagttcgagaccagcctgaccaacatggagaaaccctgtctctactaaaaatacaaaattagctggcatggtggctcatgcctataattccagctactcaggaggctgaggcaggagaatcgcttgaacccaggaggcggaggttgtggtgagccgagatcacactgccctcatatttgcattttaaaataactctggggtctggcacagtggctcacgcctgtaatcccagcactttgggaggctgaggctggcggatcacctgaagtcgggagttcgagaccagcctgaccaacatggagaaaccccgtctctactaaaaatacaaaaattagctgggcatgatggcgcatgcctgttatcccagctattcaggaggctgaggcaggagaatcgcttaaacccaggaggcagaggttgcagtgagccaagatctcaccattgcactccagcctgggcaacagagcaaaactccatctcaaaaaaaaaaaaatagagtttggagcaaggcagggtcctgtgccttttcaaagagggtactcctcttctgagagcagctatgttttggtccccactgtttgagggaataatggaggaaatcataaactcactcaccctcttagatgattttgtattttatcagtcacgagagcatcgaagtagattagaagaatagcagtgcatgtgtgttccacacatggttttttgcacttatacgtaaggcttggcacctcttgccagaactgcacagccctgtgggatcccagaatcacgggctttctctaccacattctgtgcaagttttcaagttctttgaaaggcatacctgctcacgcttcttctccagtctgatatcctcgagtcccaacacttaaacagtttgcccagtggctcctttgttttcctctcttaatgtcgtcactcttgctattcccattgcctgggtggcctttctctcccacccttatctgcctgactattctttaagatccacctcctccaagagctttgtttgtatcatccccaaaatcaatatgcttttggacctactttgaattcccacttcagcgtggtttaaagtatggcttcaggcctggttccattattttactagctgcatgaacttgaacaaatggctccacatttgtttttcttttttctttttttttaactagctcaagtctgggaattgatccacatttctgagtctgtttttgtcctgtataaaatgagaatagtgatagaccaaccatttttttttttctgagacggagtcttgctctgtcacccaggctggagtgcagtggcgcgatctcagctcaccgcatcctccacctcctgggttcaagcaattgtctgcctcagcctcccgagtagctgggattacaggtgcccaccaccatgcccggctaatttttgtatttttagtagagatggggtttcaccatcttggccaggctgctctcaaactcctgagctcagatgatccacagcctcagcctcccaaagtgctggaattatagacttgagccactgcacctggcccaactttacaaattctctattagtgattataagtatcttttcagtcatttagaatctatttgtatttcttctgtaagctgcctgttatatcttttgcccatttttctctccttcagaaggcattattcaaattcttttccttttttaaatgttttgattatagaaataatatataaacccattcccgtggtaaaaagattcagacgatacacaggaggtagtagagagcaaaacacagtttctcagccaggtgcagtgactcacgcctgtaatcccagcactttgggagcccgaggcaggcgggtcacctgaggtcaggagttcaaggccagcctggccaacatggtgaaaccccatctctactaaaagtacaaaaattagccgggcatggtggtgcactcctgtagtcctagctactctactcgggaggctgaggcaggagaattgcctaaacccaggaggcagaggtttcagtgagccgagatcacgccactgcactccaacctgggcgacagagcaatactctgtctcaaaaaatatatatatcagtttctcttcactcctcgattttttttttaaggtgcttaaattctggtttctaggtgcccaacctagaatagaaaccagaatttaagccttatttgggttgagcacagtagctcatacctgtaatcccaacactttgggagactgagtgggtggatcagttgaggccaggagttcaaaaccagcctggccaacatggcaaaaccccatctctactaaaaatacaaaaatcagctgggtgtgttggcacgtgcctgtaatcccagctattcaaggctgaagcagaagaatagcttgaacccaggaggtggaggttgcggtgagccaagatcatgccactgcactctagtctgaacaacagagcgagacgtcatctcaataaataaataaacagccaggcacggtggctcacacctgtaatcccagcactttgggagcccgaggtgggcagatcacctgaggtcgggagttcaagaccagcctgaccaacatggagaaatcccatc[131 bp omitted]cactccagcctgggcaacaagagtgaaactccgtctcaatcgatcaatcaatcaatcaatcaataaaccaaccaaccttatttgtaactccaaaaccgaattcttaaccatgatgctattatgcgtccgagagtacatgaggtgtcccgatttttgttttattatggtcaccataataattacagacgttataagccacctccgatcattttttaaaaagaggaagctctaaaataatagttatcagtcccaccagttgcccggggtgctttgttgtgagaagggggtggggattgggagtatactaagtctctgggaattgggtcccatggtctgccctcggggttggcttagctttctctgaagagattagtgagccctctaagtccaccacgcttggagacaaggacttttggtaagaactgctcaagggccaagagtatgctctgggaccaaatgagaaaagccccttacccgaggctaattttcttacaacttcattccttacagtatgcagctgacccccaggataagcactggctggctgagcagcatcacatgcgggcaacagggggcaagatggtaagcattattcatttgtgccactgccagtgacccaccccacctgggaaccaggattttggctgtgggtgacagcctacctccaaatctgacttccaaagcctcaccaatgtgtgagaagagagacttataaggcctatttcttcatgctgaagagcaaattgtaatcttcaggttcccttccctatccctaggtctcccttccgccccctcacacttttacctcatgcctccaagatcacatatttggatactattagctgtccataggaatagcaggtataagacacacagtactactttttcccactactgcacccactgacagatttcactcattgatcactcttccaccagacacagctatagaatcttttctcaacacagtacttgaggcagcaacccttgtcagtaggagttagcaatgaaatgtgtttgcacacttggcagccccttccagatttacctctacttgaagagttctcagatcatatgaaacagcaaccttaggaaaatcatcattgcatgtgttcaaaaactattgttgagggctttgtccatcacacacaatgtcccccacctgaggactcactcactcccaccacaggtactgctccttttagaatctaagtgccttacaaactgatatgccatctcctttctggcagtgagagctaccttttattttattttactactctatttatgcctatgctttacttcaaaaaagatttcaggtaagcttcatgcacataaaatgcaacattacataaataagaaatagatggtagggggtgggggcaggacctaaaattaagccaccagtaaaagtagttctttaaaaaaaaaaagtgttttttatattgctgacctgggagacctgtgcacttctacagatgttggcaaattcagctgtaggccccactcatggacacctgatctgttatggttcatagtgcccataagatgtagacaaattactcaaggaatacacaattattcctgaccctaacattagaaagtctcccacagaagactttctaatatgatgaatatctcttcctatatgttaagttcacaaaagggccctcacccactgtagaccgaggcattgtgacaaagcatttctacaggccccagtacaatacaggccaattactagacagcagagcagtttatcatgttttccattttgccacaaagttcaaaaccaagttatctttgtcctcagagggagcacatggtttcctcttcctgatttcctgtttccatatatattttgctggctttcttgccattttgttataacccaccttgggtcctttcgtatacttgatcttaaccaaaaggtgtaggagcaatggtggatccctttttttttctttttttcttttttttttttttttcttaattttcaccacaccattcaagagagaaatgggtccttttttaaaagagaaggctataaataagtcaccagtccctactctcccatccatgaagcatctactgtagtaaaagattgtctcaaggaaccattcccatccctccccacttactcttccgtactaaattgtaaaccgcatcccccgcttccacctagtagcaggccttacattaaacagatgtttaatgaagtgttactgagttggagtgaaatgaatcaggcaatgaccactctcccttgctcctgcctcaggcctacctcctcatcgaggaggacatccgggaccttgcggccagtgatgattacaggtaaaaccagtgggtctcctgccccttctcctctccctgcctccaaatagcccctagaatgaggcagggcctacatcctcacttcccccaacttctctcttcaatgtctgttccagaggatgcctggatctgaagctagaggaattgaaatcctttgtcctaccctcctggatggtggagaagatgagaaagtatatggagacactacggacagagaatgagcatcgtgctgttgaagcacctccacagacctgaggccgggtcccctggccacacttggcagccctcctccaaagccctcttcctcacgtggctgaggccaccgctgggactgctcctagatggatctcagcggcattaagctgtgcctgagcgagtttgtagtgactcactgcacagcacccccagactagcatgtggttctatatttgtaaagttattgggataagaaacaattaaacagtttgtagtaaacacagatggtgaacctgctgtgccctctaccttgtgggaattgacagaacatcaagggctctagaagtgggtgtaggaaaaaaggacgagataaccctcacccataacagtatagagccaggcttgataagaccaacctgggagcaccatgtaccctgcccgtcttccctttgcccatttgtagtttccttacccagctaatgtaaggacatggcagaatgcgatggagtttgatgacagatcatatgaaaaatagagttggcttttattgctcccattttacaggttaagatactaaaggacccgccccaaggttacacactacccactggggaggtaggatatacaggatatgaacctgtgttgttggggtttttgtttgtttgaagacagtcttgctctgttgcccaggctagagtgcagcctctggctcaagcgattctcccgcctcagcctcgccagtagctgggactacaggctcgtgccacctcaccagccttttttttttttcttttctttttttttttttttcttttaagtagagacaggtctccctatcctgttgctcaggctggtctcgaactcctgggttcaagtgatcctcctgcctgggccttccaaagtgttcgggattacggacgtgagccactgcgaccagcctgaaccaatgttgcctttttttatttctgtcatctctgcggagatgtatggacctatgttttctaatagggagcctgctgctctggccatcagcctttagtttttcccctcgctgggattttcagatacttaggacgcagcaaaggtgcccaggcgattataatggtgggagggtaccagtgctgcaggattggaggcactccctgcccgagggaaattggatcaaggctgggcgtgccgagtgttcccacgcggagtaagacgtgtagccagaaggaggggttcatcccacgtggacgttttcttggccctttaatggttagcgttttccaacggccaccaattcgctacggattcgttagttaatggcagcatcatctaccaatcggttgtcagaagcgggattctgccgcccaatagcggtgcgccagtgggtaggtctagcagtggcgcagcaatagagcgctccggagcgtctcattggctggatcaaacccaagcgagccattgattggtcgacgcccccagagggttacaattcaaacgcgggcgggcgggcccgcagtcctgcagttgcagtcgtgttctccgagttcctgtctctctgccaacgccgcccggatggcttcccaaaaccgcgacccagccgccactagcgtcgccgccgcccgtaaaggagctgagccgagcgggggcgccgcccggggtccggtgggcaaaaggtgagtgatgcggcctaccactcgccgggcctgccatgccctaggcattggtacccagagcaaagatttctaggaccaccccccgccgccacctcctggagcgggagatctgcgggtgcaggagaacacaccaggagctcggggcctggcattcccctgggcatgggtgtcgagggcggagacttccgggactcccacctccttgcgcgggtgagattcgagagatgggggacaggccaggagctcagaccgctctttgagactctcccgaaggagaatgggagggtaggggcgctgccagactccttccctggtgggcctagatgaagacgctcaaggaccctcgtgacttggccgagacaggggaagggagaagttgagtcgggcaaggaagagatgctaaagcctggggaattaagaacatgccagaatcatcccgagggagtctggaattagggagggtgaggactcgctaggatcgtcctgtggatctggtgagtataccctgagctgagcctgaccttggtgatgtggggagcctccatgacggctccccctgagattcaggtgggagaagatgcaccgtctggaggcctggcccatccagactcccaggtaaccccgaatactcttttttcaggctacagcaggagctgatgaccctcatggtgagtgattaagtgcccagaaccccagccttccatccaattttcagtagcctccttttttccgtcagcttttttgctagacataggggtaatgtaatttgctccctcctgggaaagaagttcatacaccccacctacaccatttcttccagcagtccctcctcccaattccatccccccacacgaagttatctcgaacacttccctgaagtcatacaagaccctccctatccagtgtgtccctacttcctagccccaaccaagctttacccacacccaactccccgcccttcttggtatttctagcctatgaatttggttgctttattttggatcagagtgatgagattaaggggaggctgggcgcggtagctcacaccttataatcccaacactttggggggctaaggtgggcggatcacttgaggtcaggagttcgagaccagcctggccaacattgcaaaaccctgtctctactaaaaatacaaaaattatccaggcatggtggtgcatgcctgtaatttcagctactcgggaggctgaggcacaagaatcatttgaaccgtggagacagaggttgcggtgagccgagcgcaccactgcactctagcctgggcgacagagtgtgtgtgtgtgtctgtctctgtctatctctctctctcaatctctctctctctctctctatatatatatatatgtaaatatatattttttagtagagatggcataaccccatctatatctcatatatatacacatatatatgtgtgtgtgtatacatatatatgtgtgtgtgtgtatgtgagcatatatatatatatatatatatatatataaaattaaggggaaagctcacccactgacctttgctatgcccaaaagtgtactccacattccaacaaatgtgttttctccccagatgtctggcgataaagggatttctgccttccctgaatcagacaaccttttcaaatgggtagggaccatccatggagcagctggaacagtaagtgtagggctgggatgggtgagtgagtctggggaaaggtgggaagtgagatccaagtgcgagctctgcttcaagcctttggcggagcaagacactcctcctgtgactgtttacattctctgagccatgtggccttgttctttccctctgtgcaataaagggtgggtttaaagcagggctgcctatcttagatgtttacatggggggacagacagcaaggaaatggatgaagtgaggactttggccaatagggccagatctcaagaaggcagcttcccattgctgcagatcaggtttaagatgagtcagaagtccaaatctgtgccaaatctaatttttacgtattagcaactaatattcttttttttttttttttgagacggagtctcgctctgtcgcccaggccagactgcggactgcagtggcgcaatctcggctcactgcaagctccgcttcccgggttcacgccattctcctgcctcagcctccgagtagctgggactacaggcgcccgccaccacgcccggctaattttttgtatttttagtagagacggggtttcaccttgttagccaggatggtctcgatctcctgacctcaagatccacccgcctcggcctcccaaagtgctgggattacaggcgtgagccaccacgcccggccagcaactaatattctaattgaactaaagcacaggatgccaatttacaatccttagaccaaagagtcactgatgtctccaccagataagaggaaagcatcaggctaggcatagtggctcacacctgtaatctcagcactttgggaggctgaggcaggcagatcacatgagcccaggagtttgagactggcctgggcaacatggtgaaaccctgtctctaaaataaaaactaaactaaaaaaactttttaaaaaggcagtggggagcatcagaaccagctcaacagtttgtctactgtccggtcccagagaaactcaagattctagcaagccccttgtgtggggcttgggttgggacatgaggctgctgctggagcttactctgcaactgtttctccaaatgccaggtatatgaagacctgaggtataagctctcgctagagttccccagtggctacccttacaatgcgcccacagtgaagttcctcacgccctgctatcaccccaacgtggacacccagggtaacatatgcctggacatcctgaaggaaaagtggtctgccctgtatgatgtcaggaccattctgctctccatccagagccttctaggaggtgactttagagaccacccctcccctccatgcaacttgggaacctgtcaggactccctggggtcagcctcttctaccgccttgaccttctctttctctccacccacagaacccaacattgatagtcccttgaacacacatgctgccgagctctggaaaaaccccacaggtgagtcctcagtccttgagcccagggtgatccctcccccaaccttcaaaggctccctcaaacaaaaggagcccagtgacttgggaccgggttggttggggcagggtggagtgtcggcagcaacccacttctgtttctgccccagtgctcctatttgctataaaatagcaattgttttatagcagaataaaaatgtttggcgataaataattttgggaaattattggtgagaccaaggcaggaggatagcttgaggccaggaattcagtagagtgccttgcctgtgccctccagtctcactggaagcaagcccttccaggagagctgcctagatgggcagtgcagggagaatgccgggctgggaaaccagcccctcctccacctcctccgacctttgcatccctggtccagctgcctcttgcccaccttaattcatcctgggccaggcacagtggctcatgcctgtaatcctagcacttggggaggccgaggtgggtggatcacatgaggtcaggagtttgagaccagcctggccaacatggtgaaaccccgtctctactaaatacaaaaaaaattaaccgggtatggtggtaggcacctgtagtcccagctactcaggaggctgaggcaagagaatcacttgaatctaggaagcagaggttgcagtgagcagacatcatgctattgcactccagcttggtcaacagagtgagactccatctcaaaaataataaatagtaaagattaactcatcctgtctccatcactcactgagacctgcctgttctcttccagcttttaagaagtacctgcaagaaacctactcaaagcaggtcaccagccaggagccctgacccaggctgcccagcctgtccttgtgtcgtctttttaatttttccttagatggtctgtcctttttgtgatttctgtataggactctttatcttgagctgtggtatttttgttttgtttttgtcttttaaattaagcctcggttgagcccttgtatattaaataaatgcatttttgtccttttttagacaagttgttgcgttgtaatttcactagggttggaggtactcagggtaggcagaggtggaacttaaggatgtggggccaagcaatggggtgacaaagatttattcccttgtaccttattttatgactctgcatctgtttcttcatctataaaatgagtgtcacaataatgcctcctgtctatggagtcggtgatgtgtaccagcaatgttagtgaatgttggagctccctcagctgtgttgcagatgaggctgagccagaccttaggctgaaacctactcctatagctgtagaaggaacaagcgtgtgtgttgggggggggatcccaacacacagccacccatgttctgtcctgaagaagaatgcttaggtcaccctaagcaggtccagggcctggggagacagccaggaaaaaagccccttccctggcaggactcaggtctgagctctggtctccaggctctagcccaggtccccggtggagctccacctccaagggggcacagtcgcctcctgctgcatatcccccagggagcccccagccccttgggctgcctctttcccctggcctgatgaaggctccagtctttgagcccctaggaggaaacacccctgctgaccagctgggtccccacaagggtcggcaggtggaagagtaggttgaagtgatagggcccccacaaagcccttcaggaagatctccaaggtagataagcagcatccagatgtgctccaaccttgcacccaactccttcaggtctgttagcagctggttggttgtgcaagcctgaagcgggaggggtttgggattggaagttgggtcccttcatgtctataattgtgctcttaggtctctcctcttgggttttttcttaatctaacattcatacaaatacacttgggatcttgttaaattcttttctgtaggtgtgaagtggagcctaagatccagtctgtttatttattttggtttctaaatagtttccaagtgatgtcattgctgcggtctgcttaagaacaaaatttagagcaatgttcttagaatgtggtccttccagcagcagcagcatcacccggaacttgttaggcaaattcttgaccccaaactgccctccaggttctgaaggtctcccacggttgaaaatcactaggttagcggatactggagaaaaccagagctcagaacctggcactaaattagtcaatatatgctggccagggccgggtgtggtggctcactccctgtaatcctagcactctgggaggcggaggcaggaggattgattgcttgaacttaagaattcaagaccagtctgggcaacacagtgagacccccatctcaaataataaattttaaaagaaaaataaataaatcttggccgggcctggtggttcacatcagcaatctcaacatcttgggaggccaaggtgggaggatcacttggggccagaaattcaaggttatagtaagcttatcactccagcctaggcagcagagtaagaccttatctctaaaagaaatgtttcgaatactaactgtggtggatgtgttttcatctgccatgtggtccttggtcacggtgtttggtaccttagatggccacatggcctgccttgggccagtcacaggtctaaactgtagttcagattcaactggtgttgtctggaattaatcactgggagagagtaaagttattttactaatggggttgctaaaagagaagggagtcagtctcagctgctgggggagcccgctgcagacggaagaaagccaagtagagacaaacagctgggagtcggagagatgacattaactgagactctggcctccagttcatgctttgccatcccagttcgataaactaacaaatccctttttggtttaagtccgtttgatttagatttctggcacttgcaacagaaagaagcctggtcaggaagtatttgaatttctggttattatgattcccattttattgaattcctacaagacaaaggccctctgcttggggctggggacaaaacagggaaaatacagctctgcccttaaagaggctggaatttgggggacagacaggcccatcaacagcggggactgcggaataagtgccatacagcccagttattaagctcagaccagtctgggcacggtggctcatgcctgtaatcccagcactttgggaagccaaagcgggtggatcacctgaggtcaggagtttgagaccagcctgaccaacatagtgaaaccccgtttctactaaaaatacaaaaaattggccaggcatggtggcgagtgcctgtaatcccagctactcgggaggctacggcagaagaatcgcttgaacctgggaggcggagattgcagtgagccgagatcgtccattgcactccagtctaggcaacaagagcaagactccatctcaaaaaaaaaaaaaaagaaaaagaaaagctcagaccaggtaagcagaactgtttcaggatcctggctccacctccatgttgcccgtaaacatgtaggcagttacatttaacctctccgtaaaatgaaaatactggtacctacctcataagacagtggaaggaccttagaacaatgcctggcacatagtaagcactgaataaatgttggtgctgaactcacatattgctatgtaagttcacaggtggagcacccaatagaataggagggtcagggaaaggtttttggagaaggaaattgagccctgagggagatgcacattccttggatagcaagaagttcaggagtatgtaaggagaggaatacagagctaggcgtggtggctcacgcttataatcccagcactttgcaaggctaaggcgggcagatcacctgagctcaggaattcaagaccaccctgaccaacatgatgaaaccccatctctactaaaaatataaaaattagccgggcatggtggcaggcacctgtagtctcaactactcaggaggctgaggtaggagaatcgcttgaactcgggaggcgggggttgcagtgagccgagatcacgccactgctctccagcctggctgacaagcacaaaactctgtctcaaaaaaaaaaaataatacaggatggggaagtcgcatagatgtcaggtcatgataggctggaaggccatattaaggtacttgggctagccttggtaacaaagtgagactccatctctacaaaaaataaaataactaggggctgagaagggaggatcacttgcacctaggagttcgaggctgcagtgagctataattgtgccactgcacttcagcctgtgtgatagggagattcagtccttaaaaaaaaaaaaaaaaaaaacttggactttatcttgaggcaacagccagctaatgaagccttgagcagggcagtgacgtgatcagattttttttttttaaatttattttttgagacggagtttcactcttgttgcccaggctagagtg[131 bp omitted]gacggggtttctccatgttggtcaggctggtctcaaactcccgacctcaggtgatccacccgctttggcctcccaaagtgctaagtttacaggcatgagccaccacgcctggcttatgttattttttaagacagagtctcactctgtcacccaagctggagtgcagtggcgcaatcttggctcactgcaacttccacctcttgggttccagcgattctcctgcctcagcctcccaagtagctaagattacaggcatgtgtctggctaatttttacattcttagtacagaggaggtttttccatgttggccaggctggtctcaaactcctggcctcaagtgatccgcctgcctcggcttccaaagtgctgggattacaggcatgagccacagcacccagcctccatctctattttaaaatatgtatatatttcaaaaaaaaaaaaaaaaagacatccaggtagaaccaataacaggtagatggcatcagaattaagagccttgttcccgtgcacaccacatagcacatggcgatactacctaggttattatctgggtgcctgtgtacttcacctccctaggccttagttttccaactgtaaaatggagataacaacatctgcctctagggatgttatgtgagtgaatgagacaatgtctgtaagacatagtatacagtaggcactcagtaaatagtaatgattaccaaaccccagcactgatcctggctggaaataaaaacagaaaaacatgaataggacaaaagaggaagagaaaaagacagatggagaggaagaactaaagcaatgagtaaggtgacaatagaggctgggcacgatggctcatgcctataatcccaacactttgggaggccaaggtgagaggattctttgagctcaagagtttgagaccagcctgggcaacatagtgagaccccatctctgctaaaaataacaaaaactagtggggaggggtcacccatttatagtcccagctactcgggaggctgagacaggaggattgcttgagcccgggaggtcaaggctacagtgagctgtgatcacctactgcactccagcctgggcaacagagcgagaccctgtctcatttaaaaaacaaaacagaaggccagatgtggtggctcatgcctgtaatcccagcactttgggaggctgaggcaggcggatcacctgagatcaggagttcaagaccagcctggccaacatggcgaaacctggtctctactaaaaatacaaaaattagccaggcatggtggtggacaccggtaatcccagctactcaggaggctgaggcagaagaattgctcgaacccaggaggcggaggttgcagtgagctgagatcgcgccactgcactccagcctggatgacaagagcgaaactctgttaaaaaaaaaaatgcttgctatgtgccaggcactgctgtaagcactttgcacacactaacttcttctcacaaccccgtgtttactatcactatccccattttacagatgaggaaactgtggcacagagtggtttagcttgtcacaggcagtgagcactcacacacaggcattctgtctctaaagctaaactacccctacacttaattagctgccatctgatacctgttgtatacgaattgctatggcagcaaatagccagtgagggcaaggttcaagggaggagatggtagttgagctgggtcttgtaggttgaagaatctgccagcttataagaaggacaagggcattccagggagggcaaacagcatgtgcaaagtaccaagggcttgaaaatgcaccccaggtccatatcaggaatacattgcccagtgtggctgcagccctgtgaggactatgggaagaaagagagggagggagggagggagggaaggaatttggatctcattgtagaagcagtgaggagccttgaactactttcaacagggcagtggccaagtcagatattttagctcgctgctgctgatggccctctgtagagcgcactggcagagaccaggtggaggcagggatctggggtcaaatgatgagatcagaatctccttagtgggtgcctccaccctcccctacaaccaccagtacaatttgaggagtaagcacttggaagaacagaagaagtaaaaggtcgagcagaaacaatgctgcctggcatggatgggcacctacttcccctctccccagctagggagcctgcagaaggtggcagctacgacaacatctaagacgcaaacgttccagaaaaggatggtggggaagtgagggagcttcccggctccccagggttctagcctctcccaccccctcaccctacctgccgtctcaggacccctccgcagtccgccggctcaccctgactcaactccaagcccctgcagcctcctggagccaccactgcctgtccgccaagctgtgcacgcccagcgccagctgtcaggagccggctgcaaacctgcagagcgagtcagcgccatcgagcactcgcagccgccgcctcgggctccagggcccagctcccttccacatcccgccgctcagacagcctctcccggggatccccaagggtgctccgggtggtgccagccgggatggcgccctggaccacagcccttgcgacctgctgtcctcggctctcccctcattcaggccacgagttttggaacatttgcttttattccttccagacaaagacccacaaggggtcgcgcctccctggtggggacccggcagggcggagtctcccacaccctagggacacgcgatcttggtagaggcgactgtccactccttactgcacgccctccatcatcttcaggaactctgagggaaaggagagggagagggtcaggggtcccactggggacgcagaggccaggccagggctccagccacacagaggggatgactttttgtttttgtttttgttgagacagagtctcactctgttgccaaggtcgccaaggtctgtcacccaggctagagtgcagtggcacaatcataactcattgcagccttgatctcctaggctcaagcgatcctcttacctcagcccccggagcaactgggaccacaggtgtgccaccacacctgcctttttattttattttattttttgtaaagacagggtctcactatgttgcccaggctggtctcgaactcttggcctcaagcaatcctcccacctcatcctcccaaagttctaggattttacagtcctgagccaccacgcccccctgcctggtcattaattgataaactgcacagagtcgtggagcgcttctatacctgcccccaggagactatggggaacttggtgaagttacgcccagcccagcccacaaggccaaggacactgcaccggagccaggcaccagtgcccgccgtcctctggggctcccacccgctcttcccaagctcccgttggccctcaccgtcgaagtcaatgcggccgtcgttgttcttgtcgccgtctttcatcagagattcgatctcctcgtccgtcacgtgctccccggaggccctgaaaatctcagccagctcctccgggtcgatgtagccgtctgcattccttcaggtccgagggacagggcagggctcagggccggggcgagctgccctggccaccacactcgacgccccgcttccgcactcccaacacggggaagcttccagcgctgccggccgggttctgactgctaagcccctccctcggctcccgggcccccagcgcacctgtcgaagatgcggaagcactcggccagctcctcctcgctcttccctttcgcgtcctctttcatctggcgcaccatcatgaccaagaactcctcgaagtcgatggtgccgctgcctgcgggcagcaggtggcagactgagcctgagcccagccgctgccgcctctccccaccatcccctgcctccgagggacacccgctcaccgtcctcatccacctcctcgatgatggcgtccagctcctccttggtgggtgtctggcccagcatcctcatcaccgtgcccaactccttgacgctgatgtccccaccaccatcagcatcaaacatgtcaaaggcagccttgaactctgcgagggagggcagagggcagaggtgaggcctgctggactgtcagcctcacacctacccccccccaacccccaccctgcctagaggccaacatgtccccagcatacatccacccagcccccagcctgccgcgcctcactcaccagcgatcatctcttcgctgaggtaggacctggcctcagcctgctggtccgtctgcaggagacacagagaaagtctgagctgaagaggcagccccagagcagttcctcacctcaaagccattcttcccaacccccactctgtcagcgcccttggttctccagaagaacaacttcaaacttgtcacataattgtgtgcccgcacagcacccaatcacagttttgttttgtctcgttctgtcacacatgctggagtgcagtagtgtgatcatagctcactgcagcctcaacctcctgggctcaagcaatcgtcccacttcagcctcctgagtagctgggactatagcatacaccacgcctaatttttaaaattttttgtagagatggggtcccactatattacccaggctggttttgaactcctgggttcaagtgatcctgccacctcggcctcccaaagtgctaggattacaggcttgagccactgtgcccagcttctgaccccagtttttgtttttgctttttgtttttgtgacagtctcgccctgtcgcccaggctggagtgcaatggcgtgatctcggctcactgcaacctccacctcctgggttcaagcgattctcctccctcagcctctcgagtagctgggattacaggcatgcgccaacacgcccagctaatttttgtatttttagtagagacgaggttttaccatgttggccaggctggtcttgaactcctcacatcaggtgatccgcccacctcggcttcccaaagtgctgggattacaggcgtgagccaccatgcccggcctgaccccagttttttttgtttgtttgttttgttttgttttgagacggagttttgctcttgttgcctaggctgcagtgtaatggcacgatctcagctcgccacaaccgcaacccccacctccggggttcaagcgattcttctccctcagcctcccgagtagctgggattacaggcatgcaccacaacgcccggctaattttgtatttttagtagagatgaggtttctccatgttggtcaggctggtctcgaaccccctaccttaggcgatctgcctgcctcagcttcccaaagtgatgggattacaggcgtgagccaccgcgcgcagcctgtgaccccagttttgagcaaaagagaggagacaacaagttaagcccaaggccttctcacttgtcaattgaaggccaagtcgggaaccccccccaccccccagtgaccttaggcacgtcaattagcgtgccttcatcttttctctgtagcttttcagggatgagatatcaggggtgtgaaagggctttgtaaagggctagcaccattccagcactattttccagttttctgcagctcctaatggtgcccggtactttaatagttgctcaataaaatgtttgttctcaaataaataataatgcaacacaaagttattgagtacttgctgcatgtcaggccacagatcaggcactggaaccacaaagaagagataaaagacacatcatcccgcccctcagagaactggcagagtcggaggctgtcagcttccttcttaggattcagtcattggagaaaaggcccctcatggggggccgaatgtgatggaggccttgacatgaaagtgagatttctgcaggggtttccacgtcatatccaagccaggccatctgggtcagaggctttggattgaggctggcagtgaggacagggtgaggcttccaaggagctcttcagccagctggccaccagtgctcctccttctccccctccttcctctcctcctctttccctatgccaggagggcaggctatttttagtcaggcatgggcaacagcagctggcctctgggatctagttactccttgaagtgaagtggggagggggatctcagaccaaaacaacagctccaaatcagaagccctctctaggagagcggagtctctctaactctggtctgtcatcttctgccccttcccatcatcctcagggctcccagagccctgcatctgagcaggccccacgccctgccggcctcccgtcttctggaggaggctttcttctctccatgatgataggagggtttggccaggcttctggctcacccctgccactggcctgctgggtgactcactctgacccctcagagtccccactgtgtgaaggaaacaagctaagagctcttcacaggtctatgaatgacactgctggaagtttccagaagtgagtaggcagtcagcaagccttaaggatcaatctctggaatatcccagccctcccctttcaagaaaagtcaaaggccttcctccaagacacctgggttccaggaacctccatgctccaacctcaaacatccaagttactgccccacagagcacccaggcctggcctgaaaggggtccagagtgctcccgtgagtaaaggcacaaagtcccctcttgtccttaccatggttgctggtgaccgggactcctctgttgcaggtcgcctcctttgcactccaccacccaaagatgacctggcctgctctagcccccgggatttgtaggggcaccctcccctcccacctccctgctccccagcactggagaccctgcccaatcagatcctggggtcagcgagtcccacccctcccacagtctgaacccattacctaatttagccaagggcccttgcagagaaatttaagcctccaagcaggtggcaggccttgacgtcctagattcttgtgaggaaggcctgccctgttccactgccttggagtccccccgaccgaggaagcacactggctccaagatggtaaggatgatcagagtagtaaagggtgaggcagcatggtaaaatggggagagtacaagccttgaagtccaaaacccaagatccaaggccagcctctgcgagttgtgtgaccttgggccggtagcagtgcctctctgagccatttcttcatctgtgggattggacctgtctgtggggtctccctcacagagagaccatggtaaatgggaacccgggtataagtcacctagcttgtgctgggtacacagcgttggtgcttggcaagaggaatgtcccgtctttgaaccatggtaaggggcaggggataggaggagaaagtgacaggtaggccactgtttactgaaccccatgacgtgccacacactgtgctaagcattttaacatgatctcatctagtgctcctcctatgaggtagcaacgattatccccacttgactgcagagctttgtaaattataaaggtctatactcactctgtcaccaaggctgatgtgcagtggtgctattatagctcactgcagcctctatctcctgggctcaagtgatcctcccacttcagcctcccgagtagctgggactagaggtgcaccaccacccctggctttttttttttttgtatttttatagagatggggtttcaccatgttgcccaggctggtctcgaactcctaggctcaggggatccttccaccttggtttcccaaagtgctagaattacagtcatgaggcaccatgcccacccatgttgatgattcttattattaatcctgactggagggaagttgggacagacagtccttggggcacctgtccagatggaaaaatgtatggagggatggaggagaggaggatgtgcatttggaggagaaataatcattgaaagcaaagatccttctctgaaagttaccttctccagggaaagggtgtttggattcactttttttgaagtaaggagtaggcaggggaaggttctttaagtggtaaaaggacagctggccccttcctagagctcagtgaagaaatctggtcatctggggagtaaaggggtgggcagaccaagtccagagggagcccaacctgagaatccacaaggtgcaggctgggcactggggagtaggcaaggcttgtagacagtggctacgtggacagaaagagcaccaagacaaccgatagcaggctctggggccaggaaaggggggctggacaccaaggaatgcagatggacagtggcaactgggctgcccccttcccctatatatagacattcccaaggaaagctcagcagggctgggccaagctaaataaggcctcccccaggcaggcagggtgccaaagggtgagggagacccatgggattccaatttagtttttattgttttttggttttttggggttttgtttttgagacagactctcactctgtcacccaggctggaatgcagtggcacaatctcggctcactgcaccctccgcctcctaggttcaagtgattctcatgcctcagccttctgagtagctaggattacaggcacataccactacgcccagctaatttttgtttttggtttttttttttttttttttttgagacagagttttgctcttgttgcccaggctggagtacaatggtgcaatctcggctcaccacaacctccgcctcttgggttcaagcaattctcctgcctcagcctcccgagtagccggaattacaggcatgagccaccatgcccggctaattttgtatttttagtagagacagggtttctccatgttggtcaagctggtctcaaactcccaacctcaggtgatccgcccacctcagcctcccaaagcactgggattacaggtgtgagctaccacacccggcaaattttttactttttgtagagacaaggtttcatcgaccgggcacggtggctcaggcctgtaatcccaccactttgggaggctgagatgggcggatcacgaggtcaggagatcgagaccatcctggctaacacagtgaaaccccatctctactaaaaatacaaaaaaattagccgggcatggtggtgggcgcctgtagtcccagctacttgggaggctgaggctgaggcaggagaatggtgtgaacctgggaggcagagcttgcagtgagccgagatcacaccactgcactccagcctgggcaacagagcaagaccccgtctcaaaaaaaaaaaaagtttcatcatgttggccaggctggtctcaaactcctgacctcaagtgatccgcctgcctcagcctcctaaagtgctaggattacaggcatgagcccctgagcccagcctttgttcttttgtttattcaagggattaggtaaggcccaaattgcttaatgtagccaagcaaggtcccattggcccttctaatctcactccttccctccacatcatgttgctgtctgctctgatcagactttaaaatactgctctaggctgggcacggtggctcatgcctgtaatcccagcattttgggaggtgcaggctggcagatcacgaggtcaggagttcgagaccatcctggccagcatggtgaaaccctgtctctactaaaaatacaaaaaattgctgctgggtgtggtggtgggcgcctgtagtcccagctacttgggaagctgaggcagaagaatcacttgaacctggcaggcgaaggttgcactgagccaagatcatgccactgctctccagcctgggcgacaaaaggagactgcatctcaaaaaaaaaaaaaaaaaaaaaaagactactctaaacaccaccttctatgaaccttcaagcctttgcacatgctgtttttttctgccagaaactcccatctttcctctcttcatctgtctacttccctatcatctttctaagctctaacatcacttcctcggggatccttcccccactgtgtccagaccagggagtccaaggtggtctctagtagtttcctcaatcatagcactgagcataccttatgctcacaacccattctatgttctacagatcatcacatttcccagtgctcagcacttgctatgtagcaggtgttcaacagatattatattctacataagaataactgaactggatggtatttagttcaatataagggggaacttcctaatagtcatagttgaacaataatgggaacaggtggcctcaggaggtaatgagctccgtatcactgagtatacccaaacaggagctagatgaccatttctcagggaggctgtagggagatatccatacagaatttaagaatgggggcagtggctcacacttttaatcctagcacattgggaagctgaggcaggtggatctcttgagcccaggagttcaataccagcctgggcaacatggcgagacgctgtctccaattaaaaaattaaaataaaacaaagaatggtgggtggtagctcatacttgtaatcccagcacattgggaggcagaggtaggaggatctcttcaggccaagagttcaagatcagcctgggcaacatgcaaccccacctttacaaaaaataaaatactagccaggcatggtgggcacatatctgtagtcccagatacttgggaggctgaggtgggagaatcacttgagcccaggagtttgaggctgcagtgagctatgatcgcacccctgcactccagcctcacaacagagtgagactctgtctctgaaagaagaggccgggcacggtggctcatgtctctaatcccagcactttgggaggctgaggcaggtggatcatttgaggtcagcagttcgagaccagcctggccaacatggtgaaaccccatctctactaaaaatacaaaaattagccgggtgtggtggcacatgcctgtaattccagctacttgggattacttgtaattccagctacttgggattacttgaggcaggaaaatcgcttgaacccaggagatggaggttgtagtgagccaagagtgtgccattggactccagcctgggtgatggagtaagactctgtctcaaaaaaaataaaataaataaaaataaataaaaaaggaagaagaagcaggaggaggaagaaggaagcaaaaagaagaagaaataataatagtggagaatgcgcaaccttcagatctcctagttctgactgtttatatgacccagcataagcccttcccctcactaagcctcagactacctatctgtaaaatggaggtgataggccagatttctgaggggccctcctgctctaacaacccatggtttcatgaagaccagctttgtgcccagacatgtaaggcatataccgaaggacaagttattttttaaccaatggttggtgaatgagtgagtgttgaattaatgaatgaagtatgccttttttgtcccaatatcttgcccataagccaaatgaagagtaattcgaggtttgaaattgtgcaaactggccaggcacagtggctcacgcctgtaatcccagcactttgggaggtagaggcaggtggatcacttgaggccaggtgttccagatcagcctggccaatatggtgaaaccccacctctactaaaaatacaaaaattagccgcatggtggcacatgcctgtagtcccagccactcaggaggctgaggcaggagaattgcttgaacctgggaggcagaggttacagtgagccaagattgcatcactgtactccagcctgggcgacagagcaagactctgtctccctctctaaaaataaataaataaataaataaaattgcacaaacttaggcttaaaatcccagcccctctatttcccagatgtggatcttggggaagtcactttgcctcagtttcttcatcttgaaaatggaccattaatgtccagttacagcctcttccccaggacgctgtgagggagagatgtgacagtaaagtgcctagagcaggatgtagaaagtggaccctcagaaaataagaaccccagcctttctgctcacatgggagggcagggagctgaaataccttctgcttatcccaaggcattttcccccacccttctctcctgtgccactcagaaagggtaggagctactttggagagattttgattttatttattgtattgtataactatcaaaatctgccctaacaactgatacctaggctttgtgacaggaagccacaataactttttcttgacctgcagctgccctgcggataaaagataaaacaaagctggggagccactgagattatcaggcctgctgcacaggaaaagggcagtatgcagcaggggacctgggctccaggccccatactcagaaacctctgagggaggcagaggcaggtggatcacttgagcccaggaattcgagaccagcctgggcaacatggccaaatcccatctctacaaaaaatacaaaaattagctgggtgtggtggcgaacgcctctattcctagctactggggaggctgaggtgggagggatgacctgagcccagggaggcggaggttgcagtaagcagagatggtgccactgcactccagcctaggtgacagagtgagactccatctcaaaagagaaagaaagaaagaaagagagagagagaaagaaagaaagagagagagagaaagaaagaaagaaacctctggcaagctgtgtggttaagccaagtaactcaccctctctggtcctcagtttccctgtttgcctacttcccatgtgtgaggttcaaatcagattgtgcaagcctgtgaacactgtagaaacaataatcattatgtaagtgatcatttcgtcagcctttgctctatgccaggcacgggacgagcgttcttacaagagctgcaaaattagttttagcagtattgttcctgttttacatatgagaaaacctaggctcagcgaggtcagattccaaccaacccaaatcacgcatcttctcctggcccttcgttttctctcgggagacatggcctccctactattgcataattactttgtgaagttaaagagcgttgggtggaaatgagtgggacagattggagatgacgtgggtggggtgggaggattcaaggagggtacgcgcctggccggactgggatgactctgcggcaggcctgggactccctcaggccgacccaggcttcccaagtccctcctggagccaagggcccgggattctcgggcggctcgggcgagcgggcggggcaggaggcggggcggcggcaggaagctgcccgagcggcgctctgagcggcctgagcccggcggagccctgcagaacccggccgacctccatgggctgcggggggctgcacccggacccctggggcgcggcgcgcccctgaatgcaccgtgggacgcaggaggtagaggcgcacgaggcggcgcaagagacatcgggagggtcctgagcccctccggggaggaacgcggtcctaggctgagtgggttggggggaaagcgatgctggctgggtcccctggttcgcaagacctcggactgccagggggtggggcctcaccgcgcccctccctctccggttcgggccccgcccctcctcctcctgcgccgggctggggtacccctcctccgggatccggtacacagcgtcgcgcgctccccccagggtgccatggcctcccggctcctgcaccggctgcggcacgccttggccggcgacggccccggggaggcggcggccagtccagaggccgagcagtttccggagagctcagagctggaggacgacgacgccgagggcctgtcctcccgactcagcggcaccctcagcttcaccagcgccgaggacgacgaggacgacgaggacgaggacgacgaggaggctggccctgaccagctgcccctcggggatgggacgtcaggagaagacgcaggcgagtgcaggaggacggaggcgggaaccctggggctcgattaggcctccatcccagccgcgttcccagagcatccagggcgctaagttgatccagctgaaactcccacacttcttaaagcgcctgggccacctcttggctgtgtgaccttgagagagtcttaacccccctctgagccaagttttcccttgtgtcaagtgggagaactcactctcatctcagaattgctgcaggcattaaatgtacagggcttgggatccgaatggaaatgatgtattaacgatattttgagggtggagctattaatttagcccctactgtctgccaggcacggtgtttggctcctcggtgcctctctgtccctcagtttccatttctgtaaaaagggggtaagtcctgcctcacactgggaggatgagtgaggccacgtcagtggttgatgtcgaccctggccctaggcccattgatatgactggtcatgtgtctgcagaacggagccccccacctgatgggcagtggggcagtcagctcctggcgcggcagctgcaggatttctggaagaagtcccggaacaccttggcaccccagcggctgctcttcgaagtgaccagcgctaacgttgtcaaggacccgccctccaagtacgtggtgagtgagggtctagaacccctgggctgtgagtccagaagtatggctaggagcaagtagggaagaccccaacttcctgaggggtctatgtagttataaatggttaccttgtttacaaatggggaaactgaggtcagaaaggggatgtaacttgagcaaatcctcacacaagacttagtttccttgagactgactgaagtggggattaaggaccttcctcttaacctggttttgagactaagagaactggtgtgtgcacttccccacccagcccacaaggtttttgcaaattgtagcaagatgtgagatacagagagacagatgttatctgggtcaaacttgagatccaagttgcatgggctggtagttaaggaaataggctttcgatccagaccaatcttgactcccacttatttccagttgtttgactctgggtgagttgtttaaccttggtcatcttccgtttcctcattatagcaatggggaaaatgcagaagattacagcaggagttaaatgagacaatggacaaaaagcccttagcagtgtgcctggcattatgacgtggtcaatgaaatggtagctatgtcatcattatttaactttgggttgaaaatgtttgtcatctagggcctgctgtgtccttataacgcacaggtcaatcagttctcaagcacccgaccttgtccctaagggctagacttagagggttggtggaggttaggatgaagagcaatgttggggaggaccttggagtcccttgctgttttccttgctgttgagagactgacttggagaatgaggtctgctcctttaatgcccacagcgactcctgctccagtcccttttcaggccaggcctgaaagccagctgagctggccactcctgtcagtggcagctctccatctctcactcccctcctcttcaccacccttctccacctctgactcagcaggagggggcctggagcccagtcccacatctgggcctctccacccttttctgttgctgttagtaagcaagggccacacccatggggtgactactccaatttcagcagggaccgactccgattattgagtcttttaaaaaaatttttgaggccgggcgtggtggctcacgcctgtaatcccagcactttgggaagccgaggcgggcggatcacgaggtcacgagaccatcctggataacacggtgaaaccccgtctctactaaaaatacaaaaaaatagccgggcatggtggcaggcgcctgtagtcccagttacttgggaggctgaggcaggagaatggcgtgaacccaggaggcagagtttgcagtgagccgagatcgagccactgcagtccggcctgggcaacagagcgagactccgtctcaaaaaaaaaaaaaaaaaaaaaaaaaaattttgagacagggtctcgttctgtcactcaggctggagtgcagtggtgcagtcataactcactacaacctccaactgggctcaagctatcctcccacctcagcctcccaagtagctaggactacagctgtgcaccaccacgtgtggccaatgatgaagtctgaagtggcaaaggtctcagaactctgggttcatacactggaaggggacaccaaggaatagttcagaggctgagaggaatgggggtgactgtgggtacctggatgggaagggatgacaagatagagcaggatggccaagtatgccccggcctgtgtctggagaagcaaggcacctcctgtgtacaatggggaccctaattccccactcaacttgtgggggtgaagagcacaggctttggaatcagatcaacctgagtttaaatcccagctgggctgttttccagctgtgtgacttacggcaagtctttgagcccttttccccctctttgagcctgcttcctcagctgtcagagataaggaccttccttgcagtgctgttgtgatgattaaatgaaatcacagatgtaaagagtgcttggtacaacaggaggcacagggtaaatgcttgggtaatggaactactgtcattatcacccatctggctgcatgttacaaggtcaatgagataatggatacaaaatgtaaactagatgaacataaaggcttattatatagaccagtgtgtcctgaagaaaactggtgtcctaaagtgtgtcctgcagaaaactagttccctggaatgttaatagctgtttctaaataaaggttttgcaggcaatatgttttgagaatgcagagttaaatgagaatacaataagtttctttattgttaaagtatttaatccctaatagtgatatacactgtgaatcttcaagaggacagagtaagcaaacctaactgaccaggagtggctagagtattgtcagttccacagaacaaatgtgagagaaagatctggatttggtgttagggtgcctttaacatctaacactggttaactctccttttaaacctgttggcttggcattataggttaatccatattcaggttctcagacctgggaggcggggaacttcgtgatcatcttgttcagtgttttccaaacctcagtcattccaatacctccctgattcttgtcctatctaaaaatgccacttgtgtccttttcttcttaacatttttctttaaatgaacctatttttttttctttatctttttttttttcttttttgagacagagtcttgctctgttgcccaggctggagtgcagtggtgcaatctcagctcactgcaacctccacctcctaggttcaagcaatcctcccgcctcagcctcctgagtagctaggattacaggtgcccaccaccatgcctggctaacttttgcattttcagtagagatggggtttcactgttggccaggctggtcttgaactcctgacctcaagtgatctgccgcctcagcctcccaaagtgttgggattacaggtgtgagccactacgcccagccgaacctattttttttcttaaataagtttatcgagacggagtcttgctctgtcgcctaggctggagtgcagtggcgtgatcatagctcactgcagccttgaactcgtgggctcacatgattctctgcctcagcctcctgagtagctgggaccacaagtgcccaactaattctttttctttttctttttcttttttttagagacagggtcttgccatgttgcccaggctggtctcgaactcctggccttaagctgttctcctgcctcagcctcccaaagtactgggattacaggtatgagccactgtgcccatcctttaagtaattttaaaagacaacttcatagcactaccgtacgtggaaagtctcacttgccaccgagagaagctagccataaaaataaaaggtgaggcacggtggctcacacctgtaatccccgcactttgggaggctgaggtgggcagatcacctgaggtcaggagttcaagaccagcctggccaacacggtgaaaccccgacactactaaaaatacaaaaattagccggatgtggtggtaggcgcctgtaatcccagctactcgggagattgaggcaggagaattgcttgaacccaggaggcagaggttgcagtgagcggagattgtgccactgcatgccagcctgggcgacagggcgagactaaataaataaataaagtaaataagtaagtagtgaaaatgaaacgtcattaaatcttgcctagatgttgttgcctgaaggaggccctgacctgagatccactttctgactcttttctaaaaatggagatgagaagtgttagagaagtactttttttttttttttttgagagagagtttcactcttggtgcccaggctcgag[141 bp omitted]tctccatgttggtcagcctggtctcgaactctcaacctcaggtgatccacctgcctcagcctcccaaagtgctgagattacaggtgtgtgtgtgagccactgcaacctgcccaagaagtcctttttttaaaaccaaactgagagctggccaggcgcggtggctcacacctataatcccagcactctgggaggcaaaggcgggcggatcacaaggtcaggagatcgagaccatcctggctaacacagtgaaaccccgtctctactaaaaaatacaaaaaattagccgggcgtagtggcaggcgcctgtagtcccagctactcgggaggctgaggcaggagaatggagtgaacccaggaggcggagcttgcagtgagccgagatcgtgccactgtactccagcactccagcctgggcaacagagcgagactccgtctcaaaaaaaataaaaaaataaaaaaaccccaacaaaaccaaactgagagcttctcaatttgtagtcagaaagattaaaaaacaattaggctgggtgtggtgctcatgcctgtaatcttagcactttgggaagcctagctaggaagattgttcaaggccaggagttcaaggccagccctagcaacatagtgagaccccccctcatctccatacaaaaaaaaaaaaaaaaatttttttaaatagctgagtgtggtggtgcatgcctatagtcctagctacttgggaggctgaggcaggaggaatgcttcagcccaggaggttgaagctgcagtaagctatgattgtaccagtgtactccaacctggccaacagtgagaccctgtctcaaaaaataataattaaaaggggaccaacctcctgatacagtgatatttactctagtgcacaccacctaaaaacctcaggtaccaatacttgtacatgtctcatttttggacaaacactgacttgaccgagcacttccttcactagaaacagaagtggacccagagggggactcccttgcctgggtcacacagagaaggagtagctgacctggggttagaacttgagtcctaggccagtatacttttcacagttatggcagttgtggctatctacagacctgtcctctgggtctagtttggaaaagcctgaccagggatgtggaggccaggtgtccaaagtggaacaagctccaagctggtcctaaaggagccccaagagattggctggggtttcagcttatgtctggttttccagagggggctgtcagaagaactaatgctctatgggaagggagtacaaaaaaaggggcagcagccccgggcactgaagctcatctctgtctttctctcttcttgctgccttgggcctgggtcatttcagacaaacctcaggtaagatgggactgggcttccccgccactgcgcagcagctcccgccctcctgggtgctgtcccaggggtgaaaggaagaggtggggaggtacagctgggagtgtgggggatggggaaggatggggagggaacgggcccgtggacaacttgcatttgccctgacacccaccctccctgcagctctacaccctcgccgtgatcggcccaggaccgccagattgccagccagcccagatctctcgccgttactcggactttgagcggctgcaccgaaacctgcagcggcaattccggggcccaatggctgccatctccttcccccgtaagcggctgcgccggaattttactgcagagaccattgcccgccgtagccgggcctttgagcagtttttgggtcacctgcaggcagtgcctgagctgcgccatgccccggacctgcaggacttcttcgtgctgccggagctgcggcgggcacagagcctcacctgtactggcctctatcgtgaggctctggcactctgggccaatgcctggcagctgcaagcccagctgggcaccccctctggcccagaccgccccctgctgaccctggctgggctggccgtgtgccaccaggagctggaagaccctggagaggcccgggcatgctgtgagaaggccctgcagctgcttggggacaagagcctccaccctttgctggcaccctttctggaggcccatgtccggctctcctggcgcctgggcctggacaaacgtcaatcagaggctcggctccaagccctgcaggaggcaggccttacccccacaccaccccccagtctcaaagaattgctcatcaaggaggtgctggactaacccttgcctagatttaaggccactgtgaggagaggggttgccccagaaggcaggggaaggacctgatgagaacagaatagctgggaggctgcagagggtgctgggagcccctagaagttccaaaagagaatgtgaagcagatcaaggaaacttctgttgagctaggctcagggtgagctttggctggggttgcccttgtgtagtacagggaagtctgacacagcctctccagcctataaacagccggggggctgtggcacaggttggggcaatgttcccttgttggtgggcccccaagctggcaaggcctcttggctgaaggccagggactctgcccctggagtcctggagttaagggatgaaggcaaggctgcaggtctggcccaggggaattaaaagccagccactccagtggtatcagtctctttattggatgtgagggccaaaagggactgtaactcctgtctcaggaatggggatagatgggaggttcttgaagccccaggcgaagctggtacctctggctacagcttgctctctgagacctggggcttcactcggatcacgccctcctgggcacaggtcacagctaggactccatcctgacgccacagccgcccatggaccagcccccgagagccacctgtgggtgaggtgaagggtgatgatggcctgcttcagaacagccaaatacactttttttttttttcctgaaacagagtctcactaagttgccaggctggtctcaagcgcctgggttcaagggatcctcccgcctcagcctcctgagcagctgggattacaggcgcacatcaccatgcccaacctccaagtggacttcttgcaaagggtctggcccagggcagggctgccccacacaagggtgcactgagtgtcgtggctgctccaaatgccccttcatgagcttattatggaccgtcattgaggggtaactcctcccacaggaaccccagttgacagtttaaaagcactttcacacctctcctcgcttcctcaaaaagatcacagagggaggagctctgagaacagtctccttcaacagctcggccaagcagaactgctgtacctctgaccacttgtgttaggaaaactatcggctccctgtataataaatcaagccaggtcctccaagtggtaattcatgaaaaatatccccactaccaccaccaaggggaagaaaggactcagaagagaggacttgaggccatgaggtctggcctcttccctccccatctggagactctttctcccttgctggctttgggcccaagtttgatgtttatgaggatgattgctggtttcccttacacatagcagagctcactcagttctcacagtagccaaatgaagcagttatgtgttgtccagttttccagaccaggactgaaatccagagagggtcaggaatttggccccatgatgaagccaaatctgaacccatgtcctcacttcaaggttatcaatcttggattgtgatgctattggtacttgagaataccccttatctgagtataaagaatccttgagttttgtccttggtttatcaagcaaagcttttcttcatttgaaatgtactcccttggaaaggaggtcagggttctgaagctagacattgatgaacgagtcttgtttctctcccctgcaaggaaggtccaagcaggcccttagggaccactgaatgccccgatcccaatcaggttaatcagaatcacttagagaacttaaaaatacagtttcctggaccttatccaagacctactgagtgagaatcttgagggtggaatcagaatctattttgaaaaggcatccccaaatggcagtctgatggactgcgggtttggataccactgctgtaatgtaaccctctttgtttagatgaggaaactgaggttcagatggaagatatgatttgcctattgtaatacaaagaatctgaactggttttgggactagaactgggtccctgggagaaggtgaatcacatttccagcacattctagaaatttagagcagagcaggtgtcccggcctcaccctctcattttgaagatgaagatgccaaagcctgggagggaaggaaaggaagtgacctgtgcagcgccacacaggaagtcgggaaatcagcatcacccaagaaagcaggctcctgccactcaaggtcagtgcccttgtcccacacggccccacactcaccggcccaggggctctcgcattcatagagcatccagtggtcagctcggaagggggcgtggaaccacatggaatggtccagtgagaccatgaagtgcaccttgtgctgccactggtgaggcagcagtgcagtgcccaagaaggcatagtcggagatataggcggccacgcagcagtgcatcttcatgtcgccctcgcctgcaacaggtccccatcagccctgggctcctgggctttccagctcaggacctgcacggaggtagggggaaaagggactcccgtgcatgggtgtgcagactggttgctgcacaagagcgcttggcctacagtgtgtgtgtgtgataggggagaagtgagatggcgacttggggagggcaggggtgagcagggactgaaattcagtcttcaccacccaagtctcccactctaggccccaaaaggggtgtcttcttccaatttgcacaaagatactttatagttagcagcaaagctggacaacaaccccagcgaggtgccttttgccttcctcagaaaggccttgtgtcgggattatagtcatctccaccttctccccatgcaaagggctgagagggcccaggtgagaagctaagccaacttccccatcatgcagataaggaaacaggcccagagaagggaactcatgtgcccaaggccacacagcaaatgagtggtagaccccttggagagtggtttcctcccatccatggggtactcttaccaatatagccccgggctcgcacccagaacatctgtttgggctccattctctgcagctggctcaggggggatgggtttactggcttgatctcaatggggacctcctgagcagcaattcggttgagcgccaatgggtacctcttttggaggttagggtccctgaaagtaaagggaagagggtcggggtgagacccaggaagagagggagtcacatctgcattgcctcttctgactcccctcattcttccacagggacccctgatatccccaaagctcccctcccctgtggcaggcaggatagtgcagcgtttgaatcccttcttggccacttacgagccatgtggtctcgtgctaattagtaatctgagtctattttcccatctgcaaaatgtggataatgatagtaacctacctcataaccaacactgtgaagacaagatcatgaatatctaaccaacacatcatagtaataaggcataccctgtaatatgcactgttctaagcattgtacatacaatagtattcctcacaacaaccctgtgagataggtactattatcacccccatttcatcagtgaaataagcacagagtccaggtagcttgcttaaaaattggagagacaggatttggactcaggcaatctgggtccacagtatgattattttctatttttttagagacaaggtcgtcttctcacccaggctggagtacagtggcgcaatcagctcactgcagtctccaactcccaggctcaagccatcctcttgccttggcctcccgagtagctgggactagaggtgtacgccactgtgcctggctaacatttttattatttctttattttgagacggagtctagctctgtcacccaggcttgagtgcggtggtgcaatctcagctgactgcaacctccgcctcccaggttcaagtgattctcctgcctcagcctcccgagtagctgggattacaggcgcctgccaccatgcccagctaatttttgtatgtttagtagagatggggtttcactgtgttggccagggtggtctcgaattcctgacctcatgatccgcccgcctcagcctcccaaaatgctgggattatttttacttttttttgtagagatggggtctctttatgttgcccaggctggtctcaaaatcctggccttaagtgatcctcctacttcagcctcccaaagtgctgggattacaggagtgagctgctgtgcccagccacttcattattttaaacactcaagaaacaggctgcctgacttggcctgagttaccaaaccctacacagtagggaacattgcatccccccagggggaggagcccattccaaggaactcccttcaatacagtgacaaccacccatagtgctctgcacaggtcctgccattttcacccctatcctctggagtgctgttggacagaacctcctatgatgatggaatgcctatctgcacagcacactatggtagccactagccacatgtgactatggagcacctgaaatgtggctaatgcaactgaggaacagaattgttcattctactgactttggtttttttttgtttttttttttttaagacggaatctcgctctgttgcccagtcaggagtgcagtgactcaatcttgcttactgcaacctctgccccctgggtccaagcgactctcctgcctcagcctcctgagtagctgggattacaggcacgggccaccacgcctggctaatttttttgtgtgtgtatttttaatagagatgaggtttcaccatgttggccaggctggtctcaaactcctgaccttgggtgagccacccgccttggcctcccaaagtactgggattacaggcatgaaccactgcgcccggacctatttaattttaattaatgtaatatagccacgagtggctagagactaccttattaacagcacagatctaaattcaaggtcctttaacaatgtcttcctttcatttcagcaaacatttgtcgaactgcaaccacacaccaggccctgtgttttttctgttaatagtgatataactacaattcactgccattgtgctagttagtactagcacgctaagtgccttttctctcttatttaatcctcacagcagccttatgaggtaggaatatgattagcaccattttataatggtgagtactggctcagagtgggaaagcaacttgcccaaactcacacagctagtagggacaaaatctagaattgaatccaggcctttcaggttcccaaacccacatccatcccgtcatactctgctgcctccccagtatctaacacgagatagagacattctctccttatgatacagctaagaagtaggcagggcagaaatgagcattcccattttttagaagaagaaactagggccctggggagttgggcactgtcccacagcaggtgagcattcacagaggcacagccctggacagaatccatgtgtctatcctttgtctggacccagagctctttcccctgtaccagcatttttcaaacttgattaggtgtgatccaaataaatatattttaccaggtattcaaaatatctaacatgctccctggtggtctaatggttaggggaaaatacatatttgtatttttgtacatatgttttatatacataaaacatgtggccgggcacggtggctcacgcctgtaatcccagcactttgagagaccaaggcaggtcgatcacttgaggtcaggagttcaagaccagcctggtcaacatagcgaaacctggtctctactaaaaaaatacaaaaattagccaggcatggtggcatgtgcctgtaatcacagctgcttgggaggctgaggcacgggaattgcttgaacctgggaggcagaggttgcagtgagccgagatcatgccactgcactccagcctaggcaacagggcgagactctgtctcaaaacaaacaaacaaacaaaaacatgcactaatgcaaaggcagtgaccaaacataggccatagcgctgcagctctccagaggacactcactcctggtgtgcattaagtcctaagttgctggaccaggggcctgggggagagagggaatcacttagggggctggggaggtggtacttaacaagtggttacggaagtatttctatatacatatatatataaaatatatatatggttttttttcccaggtatggtggctcatgcctataatcccagcactttaggaggtcaaggtgggtggatcacctgagatcaagagtttgagaccagcctggatagcatggtga[132 bp omitted]tgtcactgcactccagcctgggcaacaagagcaagactccatctcaaaaacaaacaaacatgtatatatataaacaacaacaaaatatatattctttttttcttttttcagacagagtcttgctcttgttgcccaggctggagcacagtaacacgatctcggctcactgcagcctccacctcccaggctcaagtgatccccccgcctcagcctcccaagtagctgggactacagacacatgccccgacacccggctaatttttgtattttttatagagacagggtttcaccatgttgcccaggctggtcttgaactcctgggctcaggtgatcctcccacttgggcttcccaaagtgttattataggtatgagcccccacacccagccccagccttatttttaaattagagatggagtcttgctatgttggcgaggctagtatccaactcctggtctcaagcaatcctcctgccttggcttcccaaagtgctgggattataggtatgcgccactgcacccggccaagcccttcattttataccatgacccagtacagacacacaccagaaacacacatgactaaacctcaagtttcacaaaaggattcttgcccttaatacatacatattattcactccagtatcttcttttctaatctgtattttaaaaatgctggtcaagacccactaaaggattctatgacccacaaacagatagcagctgcattttgaaaagtctgccatggagcctccaggtctctcaccttaaatactggtcaatgagggtctcacagtcaagcagctcttctggtggtggcacagtgggcatggagaactggtgctgcatggggctgggctgggcctgctggaaggaggcctggcagatgaagatgggcttcccatgttgcacggccttcacagagcgcaccgagaagctcgaccctgttcgtgtccgctccacttggtacagtactggcagcttcgggtcccctgcagtgggcacaaggacacagtgggtccacaggccctgtcatcatcacaacgcctgacaggcactctactactcatcttccattccatttcatctcagtgactactaactgaggtctgctaaggtccaggcccagggatacagagaccaccaggccctgtcatcaggcttctccctgtgcaggtggagcttttctctaacagcacaaacagcagagacattgacagattccttgcattcaaatcctggctccaccactcaccagccgtgtgacccttcacttctctgagcagtgtgcttatttgcaaactggggatcatcatggtgctcatcgcttacaggattttaatgataatgaaatgaatccgtagttgtaaagtgtttagaataatatctggcacatagtgagggctctatatgtgtttgttaaataaaattaatactccttgcttctatcttgctccatctatgcctgggatcttgtcatcagtccaaaaccattattctagatcagggagcagtaaatctagcctgcagcctgtttactgtttattctgttgttgttttcttttttgagaacaaacaaaggctatttattcagcgcttgttcttttttttgtttgtttgagatggagtcttgctctgtcacccaggctggagtacagtggtgtaatctcggctcactgcaacctccacctctcaggttcaagcgattcctgtgactcagcctcctgagtggggggggactacaggggtgcatgaccatacccagctaattttttttttttttttgagagacagtttcgctgggtcaccgaggctgaagtgcagtggcgctatctgggctcactgcaacctctgcctcccaggttcaagccatgctcatgcctcagcctcctaagtagctgggactacaggcgtgcgccgctacacccaacaaatttttgtattttttgtagagatggggtttcactgtgttgcccaggctggtctcaaactcctgacctcaactgatccacccaccttggcctcccaaagtgttgagattacaggcatgagccactgcgcccagccaatcagagcttgttgtagcaggaagtcaaccaccatcacttgcttttggcagagacttagaggcaggcaaaggaatgggaatgctctgtagtggaaaaaaaggcttcagggatgctcccattgcaggctgttggcatggggaagctgttggtgggctaactagaagcatgacacctggctgggcacggtggctcacacctgtaatcccaacactttgggaggctgaggcgggcagatcttctgagaccaggagttcaagaccagcctggccaacatggcaaaaccctgtctctactaaaaatacaaaaaattagccaggcctggtggcacacacctgtaatcctagctactcgggaggctgcagcaggagaattgcttgaagctgggaggtggaggctatggcaggagaactgcttgaacctgggaggtggaggctgcagtgagccgaaattgcaccactgcactccagcctggggaacaagagtgaaactctgtctcaaaaaagagtgggacatcctatgtgattggttaggagtacatatttggctttctccggttggtcctaagttggaagcaggggcaaaaattagggcagctatcagttattaatcaagtcctggctttggaggccaattgttacagtggtcattatttggcttgctggactggttggtaaagatagtggtctgacttcctacaagtctgacttgtggatagtaggctggcttcctgtgctggttgctgctattgtgcgtcagagttctgtttttctacatggtctagccattgtctgtttgtatattcagcctctcccaggcaagggccactgtcagtcacttcacccctgatgtatatggaagccatttggtccttcactgtcaggtgtctctgctccaaagcagagtggaagagcctaggcaacacagggagaccctgtttctacaaaaaataaaaaataaaaattagctggacatggtggcatgtgcctatagtcccagctaatcaagaggctgaggcggaaggatcacttgaggccaggagatcaaggctgcagtgagccatgactgcgtcactgtgctccagcctaggtgacagagcaagaccttgtctcaaaaacaacaagaccaccaccaccagagtagaaggcactggccagggataaggcagccaacaacaagcaggtgagggaagatttggagaggaagagaacttccctggtttccctgaagttctcactttgtctgagtcaggctgaccttgaggaaccctgacatctgggccatgagacatcttggggatgactttcaaccttcagatgaaagaagcaggtctagagaagtgttgcttccttcactctgatccaaatggggagtcaaccaggcaccagggctcaatcaacagcaataaacatcactgtctgaggtcaactggcttgctcagctctctgttatcaggcactgccaccagcagcacttctatcagagtgcgagctcctcaaggttaaaggcatttgagaagggcttaccaagagtccagacactagacaaagttacttgtgcagtctgctttcagacactgggaatgaagtcttcctccctaccaccaaacttggggggaaaaaacaaaaaaaaacctctaatccaatccttggtctgcaggtaagctaaagtgcagattcctgaggaggatcacagaaacttcagtactctggtctacctttcagtgtgaatgagttccagccctattcttgaaaattgttattggaacagagcaggtaggccctgaggcatattgaagggagttaatgattatggagtgatgcagggtgcctgacagcattggacaggagggtatgttttctcatgttggtctcacaataactatgtagagccactcttacccccattgtacagatgaggaaactgttgccttaaaatacaatttttttgtaataaagtcatgctaatttgtttacatattgtctatagttgctttcactggcaaaacctaaaatgtttactatctggccctttctagaatgtttgctgaccttgttctgaattcttcaagctctaaatttacctctgtagagaaaaactaaaaacaaaacaaaaacccaactaattcacattctttcctgggcttttagaaaaagaactgatttgataaatggccaaggaccaaccctccccctcccccataacatcttttatttttaaaatgtaattgaaacatctcttttttgttttgtttttttgagatggagtctcgatctgtcgcccaggtgggagtgcagtggcgcagttttagctcactgcgacctccagccgccgggttcaagcaattctccttgcctcagcctcagcctcagcctcccgagtagctgggatcacgggctaaggtcaccacgcccagctaattttcctttttttttttagatggagtcttgctctgtcacccaggctggagtacagtagcacgatctcagctcactgcaacctccacctccagggttcaagcgattctcctgactcagcctcctgagtagctaggactacaggtgtgcaccaccacacctggctaatttttgtgtgtgttttttttttttagtagagatggagtttcgccacattgtccaggctggtctcgaactcttgacctcagccgatctgcccgcctcggcctcccaaagtcctgggattacaggcataagccacatgcccagccaaaaaacagcattggttttaatatctgatatagctggcagagtcacaccacaaacagataagagctctcccctttttgccttgcagccaggaagctcagaactaaaccttgtatgaaactgcaacaatatggcttagccaaattttttgacatgatcgcttctcccaaatcccattactactggcctaatgtcctttgacttttaatattcccataataactaccaattattttagctatcttgcagcctttcaagacacaagcaagggcacaaataattatttttatttatttatttatttttgatggagacaagagtctcgctctgtcgcccaggctggagtacagtagcatgatctcagctcactgcaacctccgcctcctgagttcaagcaattctcctacctcagcctcctgagtagctgggactacaggcacatgccgccatgcctggctaatttttagtattttagtagagactgggtttcaccatgttgcccaggctggtctcgaactcctgagctcaggtgatccgcccgcctcggcttcccaaagtgctaggattacaggcatgagccaccacgcccggccaaataattatttattttgaaatggtggcttggacacagctcatttcacgctgctcctggatgaagactttccaagaaagaggatcttttccccagaacctgggatgggtaccctggcagctctctcattgtttagaattattgcccaagagcgaagcaaagaagcaggaaagagtttggcactcaaagacacataaaccaggttcaaatcctggctctgcctccttgggcactgtgggagctggttccaaacctcttcaggtcccagtttccttaggtaagaatgatggcaggaatgcctgccacccatgtttacttatgaagactaaacaagataatgcacacaactatgctctgtatcatgcaaattttaattattcccataagttaatcatcaaaaactaataatatttatggaaaactagattatgccaagccctgcactagatactttactggcaaagactcattgaattcttccatcacaggatgaagagattcagagttcaagtaatgcccccacccacacaaaagaaaacagccaggtatttcactaggctggaaggattacaatatcaaaaggctggtacttacaaacaaattaaagaaacaaagcacatatttactcccaactagcataaagataagaacctggctgagcccaaggtaagtattcaaatactttatagcagtgactgggggccgagaagaggggggccaatcaatactcctcagggatgaggagtaagagacacgggacagtatgaaaaagtgtatttaccattacagggataactttcatatttacaaaatgaagggggaaaccccatggttttcttaatacaaatcacatactgtaaaggtccacaaactcttctcagctggggatctacgcagaacacatgagggcatctgctctgggggtaacagggaaggaaagaaaacagtgagggttttttttgtttgttttttagcataggttttgcttttattttccttttatttatttttttgtagagacaaggtctcgatttattgccctggctggtcttgaattcctgggttccaacaattctccgcattggcctcccaatgtgcggggattataggcatgagccaccacacataggttttttgtttttgagacagagtctcgctctgttgcccaggctggagtgctcgcccaggctggagtgcagtggcacgatcttggctcactgcaagctccgccttccgggttcacaccattctcctgcctcagcctcccgagtagctgggactacaggcacccaccaccacacctggctaatttttttatatttttagtagagacggggtttcaccgtgttagctaggatggtcccgatctcctgacctcgtgatccgcccgccttggcctccaaagtgctgggattacaggcgtgagccaccgcgcccggcctcacacataggttttaagttacattatctgaccccagagctgtaagaagctgtagagatcatcccactaaaatacccttggtcccacccttctccattttacagctgaagtaaaccaaactgtagggcggggaggtaacctcacaaggctgcatggtaaattatggacaaaactgaagctaggccctacatctttggtttgtttttattgaccctatgctcagttgacaaaagaagccttagatcccttgactctcaggctggtgctctcttctccaacccaagctgccctacctccacacctctagcacagaggtcacagcacactgagaacctagcacagcgctccgcaccaggagctatgttaagaatggaagaacaaaagcccacaaggagcagttaagcaacaaagtcttgtgtcattatcagccagacatcaggtacccagtgagtcccagcaggtgtgaggtccaaggctcattgttagccccagacctcgttccaccctagacacctcttagggtggtagtgtccgccacccctccccttgtcttccagtctccctctcttcccttttgacctcagcccccaaggccagaaatggctgctgggccaccagggttgggttggggcaggaagtggggggtttacctgcccgaacaaagtagcagtgcagggagtgcacgtggacgtcttcactcacagacttggctgcagccaccagggcctggcccacgatctgaccaccaaacagcctcttggccggtacccagtaatgccttcctctgtagggagagggggaaagagggaaagacttgggaactgggccaaattctactaccctcactaagactctaatgcatgatctcttcaccatattggggtttaagatccttttgagaatatggtaaaagccataggtcctttccccaggcaaatatccttatgcataaaaatcctctgggccgggcgcagtggcttacatctgtaatcccagcactttgggaggccgaggcaggtggatcatttgagatcaggagttcaagagcagcctggccaacatggtgaaactccatctctactaaaaatacaaaaattagctggacgtggtggcatgcacctgtaatcccagctactcaggaggctgaggcaggagaatcacttgaacccaggaggcagaggttgaggtgagccaagatcgcaccactgcactccagcctgggtgacagagcaagactccatctcaaaaaataaaattaaataaatgtataaatgaataaataacaagagccctcagacatcaagtctaactccttcagtgtacagatgagaaaactgcagcttggccccagagatgaaaatgcttgcccagaatgtaggcccattggaagctgaataattatgtctctagcctcccacgtcccagctgtttggcattttctgtaacaatgagttatgaacagccctccatgacctggcaggtggctctcgcctgtaatcaatcccagcactttgggaagccgaggtgggaggatcgcctgagcccatgagttcaaaaccagcctgggctccaaagtggggcctcatgtctactaaaaataaaaaagttagctggatgtggtggcaagcgcttatggtcccagctaaacgggagactgaggcagaagggtcacttgggcccaggaggtcgaggttgcagtgagccatgttcgtgccactgcactccagcctggacaacagggccagatcttgtcttcaaaaacaaaaatcaaatagccctccaagaagttatttacaattccttaagtggaaggaagggagctcaaagtaagataacttccagtaaagccaggagaagccttggaggtcaaagctgttagaagccttgctgcagggggctgggcgcggtggctcatgcctgtaatcctagcactttggcagaggtgggcagattacaaggtcaggagttcgagaccagcctggccaacacggtgaaaccccgtctctactaaaagaagttaaaaaattagctgggctgtggcgcgcctgtatgtcccagctaatcaggaggctgaggcaggagaaatgcttgaacccgggaggcggaggttgcactgagccgagatcgcaccactgcactccagcctgggcaacagagcaagactccgcctcaaagaaagaaagaaacccttgctgcagtcaagaacttcagcgatgctgggaaagaaaaaaacatgcttaggcctcagaataagtaatgagaaaccagacccaccaaatggtactgggggcgggatattgtgagaagaaaaggatactgaagacacaaggagctgcggcgtcggttttaaggctgatccatcagctgtgtgcccttgggcaaatcactgccctctctgggctagctcccccgtgaaggcttagggcaggctgccgagcagggtctctcaggtcaccactatatttgctcagctgtgcagacctcgcagcgcggagaggaagggaggaagccagagcagagaggacagctctgttgggggcgagttctctcctaatcgtggcagagggtgcatcccacgcagagccatactagtcccggagccaggggccccgggcggcggcagtcaagatcaagtttctgccctaaaggaggggatgctgggcaggagctgccggctacctgaagagatcctcgtccagcggctcgaggttgagcacggtcgtgaccaagacgctacggaggtccccagggggatcgccgcggtcgccacagccctgcccatcttctggggcctgcggggacgacatctagttcaatgctgcaggccctgcacacccgctccgcggaagacgcggagacatacacagaacctgactcttccggcagattgccctagtaaccggaagtctcctgcagaccccgggaaggaggaatctaggttatgattggtcaggactcctgtcagtccgctggtggctgtggccctctttctctagcaattggagaaaatgaatgccaatctgcgaatcctgtgtgtgactggatatgtcgctgaggaggcggaacctcgggactggataatatggactgagtgtcatttcccctgtcagatagcaaatacacccccttcctcttgtaacccggtcaggcctagggttcctccctgagttccagaataggccacccagttggggcggacccttaaggcattctgggcccacgcctgcctataaaccctcatagtgtgacctttgacccctggtgtgatcttgggcccgggctgggaccagcccctagtgtgggttgtgggggcggccatggagctgggcagctgcttcaagacctatgaggacttcaaggagtgcttcagcgcctacaaaagggagaacaggtgctccttcattctcagggactgcgtctccgtccgcttccacaacctcaaccatggcacctccatccgcgaagacatcctgtaagggcgggcggggcggggcgggccaagagggtggggaggaggctggacctccggagggctgcctggaggaggaggggtgcataggcacgcattgggctgcgtggccattcattcaacaggcactcattgagcacctgctgtgtgccttgtgaagagagctaagcctccacggccattggtttttgaccacccactccactttcactccattcacaggcttttctggaatttataactgcagtttctcccattgttttgagcagctgcagcaacccaaatacaaagtatggctttcataaacggataaaaacaccttggcgataatttccttcatcagtctcctctttacaaaacagtcacatggtcgttggaatgttcgttcattcattcattcagtttttagttcttatatatttgttgaaacagggtctcactctgtcccccaggctggagtgcagtggcacaatcagctcactgagccttcaactgctgggctcaagcgatcctcccacctcagcctctcaagtagttggaactggaggtgcacgccaccatgcctggctaattatttgattttgtacagactgggtcttgttatgttggctaggctgttcccagactcctggactaagcgatctttcggcgtctcaaagtgttaggattacaggcatgagccactatgcctggtctattcattcattttgtaaatggtttttgagctccttatattaaccgttttcaaacactttccatgtgccaggcagtgttctctatgcatgctttaccctgcagggcttttttttcagaattatagataaatgttatttttttgcatttgacagatgagaagatttgacagatgagaagtcaggcttagaggttaagacaggagttgaaaactcaaatgccttcagggattaggtgaaacaacccaatgtaagaaagttttaactttgaattttactttaagaaaaagaatgatgaaatagcaaccaacaccaggtctttgtgctagggacaacagaagtgtgaaatgggccaaatggagagtagatgccatctaatcagctccagctgatggctgccatatgaaaataaagatctagtgttgccagaattttgggcaagagttgtcagaaatccacactttatgtggattttcccatttaaaaaaattgaatcagttcaaattttaactcagagcatgcgggccaactcagagttaaagcatatccgagtttgagacttggattgagatgctcaaccaaagctcctcaattagacagccaggctatattctttccactgttctgaagtccagtgctatgctgggtataggtgacataaagatgaataagtgttcaaactatccccagagaactaggataaacttgaactcaagcaaactggtgtgtgataaatgctttaaaaggaatgtggaaaaaaaaaaaaaaaaagaaatgtacggagaaagaaatgaatgacaaatgcctgggaggtgggggaagtcttcacactggaattgatggtttccctgggctgtgaatgaatgtagagtgctagagtagatctgtggttaattactgagtaccatggaggcatttgaccagaagttgctgtgcagaaggacctacaggagcaaagacaaagatacatgaaagaaggttggcatgttagagtaacagtgagggataccatgtttggcaggagatgaagtcatttgcagtctaagggtctttagggaccattgtgaggtgtttggaccttgtcctttatgggtaggaccttgctaagcaatgagaggaatacaaaaaaaaaaaaaaaaaaaaaaaaccacagttgcccgtaaacacccttcaggaagaccatctcaggtggctagcacaaggtgtggcccatagcaggcattaaataattattgaatgagtgagttatcaagtactaaccatgtgattcagggaaataggtgctgcgggaactcagaagagaaaaatcactgcgagctagagacgtaagagtgaaagggaggcttgagctgggcccccaaagatggagagctgtcagaaggtgtattggttttctgtttgccactctagtgaattaccacaagtttaatggtgcaaagcaacacaaatttattatcttagagttatttaggttagaagtcaggcacaggtcttagcaggctaaatcaagatgtctgcagggctgtatttctttctggagtccctgggtaagaatccatttcccgccgggtgcagtggctgatgcctgtaatcccagcactttgggaggccaaggtgggcagatcacttgaggtcagcagttcaagaccatcctggccaacatggtgaaaccccgtctctactaaaaatacaaaaattagctaggcgaggtggcacatgcccgtaatcccagctactcaggaggctgaggcagcagaattgcagccgggaggtggaggttgcagtgagccaagatcgtgccattgcactccagcctcggcaacagagcgagactccatctcaaaaaaaaaaaaaaaaaaaaaaaaagaatccttttcctttccttttccacctcctagaggctgcccaacacaccttgggtcatggcccccttcctccatcttcaaagccagcagtagcaggttgagtcatcacatcactctgaccttgcttctgtcatcacgtctctgactccctcttctgcctccctcttccacttttaaggatccttgtgattatattgggcccacccagataatcccagataatttccctattttgaagtcagctgatagccaccttaattctatctgcaaccttaattctcctttgccatgtaacctaacgtattcacagagtctaggattaggacaaggacatcttcaagggaccattctgcctgccacaagaagattaataacctggaggtaaaaatggtgtgagtcagtacagacgtaaacatgacgtgcttctattagaaaacagtgatgggctgggcacggtggctcacacttgtaatcctaatactttgggaggctaagacagggagattgcttgaaatgaagagtttgagaccagcccagactataatcctgggcaacaaaatgagatccccgtctccacaaaacaaaatttaaaattaggggccaggttgtggcagctcacacgtataattccagcactttggtaggctgaggcaggcagatggcttgaggccaggcattctagaccagcctgggcaacatgccaaaacctcatctgtacaaaaaatacaaaaagtagccaggcatagtggtgtgtgcctgtagtaccagctactctggaggctgcggcaggaggattgcttgatcccaggagtcagaggttgcagtgagctatgatcgcaccactgcacactacattttagcctgggcaacaacagagtaagatcctgtctctaaaaaaaaaaaaaaaagcaagcagtgatgtatgtttgcacgcacatacaaaagccatgaggagacctgcttagctagaaggaaggatttatgctggagcagcaggaaaggaaattggagggttgataagcaggttggtgggttgggatttgttttgtttgttttaggagacaaggtctcgctctattgcccaggctagagtacagtgggagggtcatagtttactgtaaccttgaaatcctggcctcaagtaatcttactacctcagcctcctaagtagctaggactacaggtatgcacccccatgccaggctaatttttttttttcaattttttgtgtagagacagggtcttgccatgttgcccaggctggtcttgaactcctaggctcaagctgtcctcctgcctcagcctcccaaagtgttgggattacagatatgaaccaccatgctggacctgtttttgtttttgaaggtgaacaattttaaaagtgtttttgggccaggcacaattcaatcacttgaacccaggaggcggaggttgcagtgagtcaagatcatgccactacactccagcctgggcgacacagcgagactctgtctcaaaataaataaataaaaagtgtttttgtgtttgagtggttaacataattaaaaatattttcaaaaagtacagaagggactaaaagggtcacctccactgcattagcttttggttttttttggttttttttttttttgagagatggagtttcgctctgtcgccaggctggagtgcagtggcgcgatcttggctccccgcaacctttgactccctggttcaagcgattctcctgcctcagcctcccaagtagctgagattacaggcacgcaccaccccacccagctaatttttgtatttttagtagagacagggtttcaccatgtttgcgaggaaggtctcaatctcctgacccggtgatccacccgcctcagcctcccctgctgggattacagatgtgagccaccgtgcccagtctgcattatcttttttatctatttatttatttcatttttatttatttacttacttacttacttattttgagatggagtcttgctctgtcacccaggctggagtgcagtggtgcaatcttggctcactgcaacctctgcctcccgggttcaagtgattctcctgtctcagcctcccaaggagctgagactacaggcatgcaccaccacgcctggctaattgttgtatttttagtagagacagggttttgccatgttggctaggctggtgttgaactcctgacctcaagttatacacccatctcagccttccaaagggctgcgattacagctgtgaggtgccacgcccagcctatgtatttatttatttttatttttgtagaggtgaggtctcactatgttgcccaaactgatattgaactcctaggctcaagtgatcctccctcctcggccttggaaagtgctaggattacaggcatgagccactgtgcctggcccactgcattattatatagaggcaatcagcgttaccttcctgagagatactgaggctgaacaaacatgtcttgtatatgcatttgcatctttttgttgttttaacacaagtggcagcatgctatttagacatagccttctgtacctgctgtacctggctcttctcacttaccaatatatcttggaaattatgccaccgtatgggcaatttgatttgactttcattgatttccttgtttttttttttgtttgtttgtttgtttttttgtttgttttttgcagttgttaactaaaaagttactccatgctggtgtctggagatacgttgttgaaaaatataaattgaatctctgctcttgtggagacaaatactaatctataatcacagaaataataatttccttaaagtggtagtagagctccaaaggaaaaacccagggtgccctgtggaggggtgatggtgacacttattctgattgtcaggaacagggtgggggtgctggttgacaccctaaaccaatgcaggctcttgctcagaaaaaactgtcagccctgagattttgcagatactttacaaagcacattcacctttattacctgacctggttctctgaataaccttgtcagaggcaaattttgctgttcccactaaattagttaatacatgtaaagtgcttacagcagtgccttgtagatggaaaatagtccacaaatattgtattgttttacagatggggagacagagccaggagaagtcaaacattaagagacaaatagtttagggccaggcgcagtggctcatgcctgtaatcccagcactttgggagaccagggcagacagatcacctgaggtcaggagttcgagaccagccaggccaacatggtgaaaccctttctctactaaaaataaaaaaattagccaggcatggtggtacgtgcctgtaatcccagctactcaggaggctgaggcaggagaatcactttaacccaggaagaggaggctgcagtgagctgagatggcaccactgcactccagcctgagcagcagagcgagactctgtctcaaaacaacagcataaataactgaaaattagacccagcctatttactgacagagctcttaattgttgtacttagccactgggctctaatagttttctaatgtcacttgtccatttttccctcaacaaacttgtggtaagaggctaagtgtttaccatgggccaggagtacaaagatgagctggagtacaaagatgaggaaattgtaggctccacccctgaggacaatagcggactgagatagcttaggaggcggtgaattcatgagcagcacaggtctttagcagaaacaagttgactgctggttgtgatgttataaaggacattcttggatcatttattgcaaactggctctgtgcagagctcactgtcttgggctttttgagtgatacgtgggtgtcttgggggactggagggttggtgggggaaatgtttttaggaggtaatttagtacatgtttctgcagccaaatacacatattactgggtggtcaggtgagatgatattaatacttatgtgaaaatgtagacataaagttccttgataagcaaagtaaagcaagtgaactaatttaaagaaaaccatttacagctggatgttgctcacgcctataatcccaacactttgggaggtcgaggcgggcggatcacttaaagtcgggagtttgagaccagcctgcccgacatggtgaaaccaactctactaaaaatacataaattagccaggcacggtgatgggcatctataatcccagctactcagggggctgaggcaggaggatcccttgaacccgagaggcggaggctgcagtgagctgagatcacgccactgcactccagcctgggtgacagagtgagactccatctcaaaaaaatttttgaaaataatggtgcagggccgggcgtggtggctcacgcctgtaatcccagcactttgggaggcccaggtgggtggatcatgaggtcaggagatcaagaccatcctggctaacacggagaaaccctgtctctactaaaaatacaaaaaatttatccaggcatgtagccggggcgcagtggctcacacctgtaatcccagcaatttgggaggccgaggcgggcggatcacttgaggtcaggagttcaagaccagcctggccaacatggcgaaacccc[135 bp omitted]cactccagcctaggcaacaagagcaaaactctgtctcaaaaaaaaaaaaaaaaaaattatccaggcctggtggcgggcgcctgtagtcccagctactcagaaggctgaggcaggagaatggcgtgaacccgggaggcggagcttgcagtgagccaagatcgtgccactgtactccagcctgggtgacagagtgagactccatttcaaaaaataaaaagaaaagaatagtgcaaatattatatgggtggctatggcagatgtaaaggtgattggcaattctttttctggaaaagctggcccaagggttaaaaggaagagctctggagtgaaagagactgcctttgcccttgaccttgggtaaaacttaacctcttcacatagtttcatcctttacaaaatgagaagggtgtggcaatgattaagaaaaattcagggctgggcgtggtggctcatgcttgtaatcccagcactttgagaggccgaggcgggcagatcacgaggtcaggagattgagaccatcctagctaacacggtgaaaccccatctctactaaaaatacaattagctgggcgtggtggcaggcgcctgtaatcccagctactccggagggtgaggcaggagaattgctggaacctgggaggcagaggttgcagtgagccgagatcacgccattgcacttcagcctggatgacagagtgagactctgtctcaaaaaaaaaaaaaaaagaaaaagaaaaaaaaaattcaggctagggggcatgcctgttatcccagcacttgggaggccaaagtgggaggattgcttgagcccaggagttcaagaccagcctggccaacatggtgaaaccgtctctactaaaaatacacaaattagtcgggtgtggtggtgggcacctataatcccagctactcagggggctgaggcaggaggatcatttgaacccggcagaggttgcagtgagctgagatctcaccactgcactccagtcttggtgacagagcgagactccatctcaaaaaataaaattgaaaataatagtgcaaatattatatgggtggctatggcagatgtaaaggtcattgggaattctttttctacaaaactggcctaacggttaaaaggaagagctctggagtaaaaaagacccccccttgcccttgaccttgggcaaaacttaacctcttgacacagtttcatcctttacaaaatgagaagggtgtggggatgattaaggaaattcaggctaggggcagtggctcatgcctgtaatcccagcacttgggagaccaaggtgggaggattgcttgagcccagaagttcaagaccggcctgggcaacatagcgagaccccatttctacaaaaaataaattaactggtcgtggtgacatgttcttgtggtcccagctactcaggaggctgaagccggaggatcacttgagcccaggagtttgaagctacagtgagccatgcttgcaccactgcactcctacctgagcaacagagaccctgtctcaaaaaaagagagaaagaagaaaaggaaaggaaaatgctcgtagcacctaaaacagtgctcagtaaatgtttgctgaagctgtaactatagtatgtagtagaaagtggtagttatttgaaagagagtcaaagatacgtgctctgggaattaccactaaatgaccaaaagttcacgtcaaaaaaataaaatcagatcaagttagaaatttttttttttttttttttttgagacagaatctcactcttgtcacccaggctggagtgcagtgacgctatctctgctcactgcaacctccgccttccgagttcaagcaattctcgtgcctcagcctcctgagtagctgggattacaggtgcccgtcaccacgcccagctaatttttgtagttttagtagagacagggtttcaccatgttgggcaggctggtctcgaactcctgacctcaagtgatccacccacctcagcctcccaaagttctgggattacaggtgtgagccaccgcacctggccagaaaaaattttattatgcacacaaaagaacagttggagattagtcagatgctccagtcactgtagtgagggcagtgttaataaagcctaaggaaggattttgaccttttttgtgattggctgttatacattaacaatctgtttacagccagtagagctgttcaaactgttttgtctatagttgattcctttaattttactgaattatgctgacaaggatgtaaagctttgtgttctgtttatgattgattagagctacatttcagggaatcaggatatcttaaattccggctatgtggctgtgggcagttggccttggagtatatctaaactgtggcctccactttcatttttcttgaaacattgctatcaactgggaagagtatgtgactttatgcccagtttcccctctcagatttttatgacggttgtttttctttttgttatgccatttgagggattgatgtttcttaaactatgaagtacttggctgtctctctccattgctgttcaggttaacagccaccatttgtaaacactttgttggagctcattccttctctgctaggaactttacaagaattgtctcaatcctaccacacctttggcaggacccttgttatcagagttttcattatccatgtatccatagttacaaggctatatagaaaagcaaaagtcatcacacaagaatcttgctaacaaactacttataaaattagtcactacttaaccatccctctgcttatccctgccagtcccattaacatgtttggtagtcaatttctggctgatgaagagatacattaagcatcaaggtaatgcaaatgtaaataaaactgactgtagactgaaatggcacatctcccaaaacttgtaggactaggcgaaatccctgcaagtgatgatagaaaaccttcagccttataccagttaacaaaggaagaagggaaatcaacaaagatgatgagatggtaaaaacttgaaaagtagaggatttgcctaggaaaaattaagcccttcggaaacttagtaaagctaaggaatattttggcaaaaccatcttttgtatgttgcaaaagtgagacaggaaatgaagtatagtgtttgggaattttttttttttgagatagagtcttgctctcctgtccaggccggagtgcagtggtgcgaccttggctcactgcagcctcagcctcctgagtagctgggattacaggcatgcgccaccacacccggctaatttttgtatttttagtagagacagggtttcaccatgttggccaggctggtcttgaactcctgacctcaggtgatccactcgcctcggtctcccaaagtgttgggattacaggcatgaaccactgcacctggcctagtgtttgggaaaactatactaggaaaagaatagttgctttaagtcattctttgattattctgagaattggcatatagctgccattataacctacttttgctaaatataataataataatcattatttttattttttgagacagggtcttgttttgtcaccccggctggagtgaagtggcgcaatctcggctcactgcaacctccacctccgggtgcaagcaattctcctgcctcagcctcttgagtagctaggattacaggcacaagccatcatgcccagctaatttttgtatttttagtagagacagggtttcaccatgttggtcaggctggtcttgaactcctgacctcaggtgatccacccgcctcggcctcccaaagtgctgggattacaggcgtcagccactgtgcccggccctgctaaatataatattaactttataattttagtctcattttccacccagatcttgtttatcactatctgggtggtagtgataaagttccacccagatcttgtttatcactattccctatgaaatgtttctgggtggccgggcgcagtggctcatgcctataatcctagcaatttgggaggccaagacaggtggattgcttgaggcccggagttcaaaaccagcctggccacatggtgaaaccctgtcactactaaaaatacaaaaaattagccaggcatgatggtgggcgcctgtaatcccagctactcgggaggctgaggcaggagaatcacttgaatctgggaggcaggggttgcagtgaggcgagatcatgccacggcactccagactgggcaataagagcaaaactccgtctcaaaagaaaaaaaaaagaaatgtgtctgggtatgtttttggctgcaattagctgaaaaccctgactcaaaatggcttattgcagatacttagaagcccagaggtgggcctccaaaggtcattgtctcagtggcctggactctgcatttttccactctgccatgttcaggtctcagctttgtccttaggaaggctccccatgtggcacaaatgcaggagtcacatccagaagaagaagcctttcttgccgggcgtggtggctcacacctgtaatcccagtgctttgggaggctgaggtgggtggatcacgaggtcaggagttcaagaccagcctggccaacatgatgaaacccccatctctactaaaactacaaaaattaaccaggcgtggtggcgggcacctgtaatcccagctactcgggaggctaagccaggagaatcgctggaacccaggaggcggaggttacagtgagtcgagatcttgccactgcactccagactgggcaacagggcaaaactccgtctcaagaaaaaaaaaaaaaaaaagaaaaggccaagcgtggtggctgtaatcctagcactttgggaggctaaggcaggcagatcacgaggtcaggagtttgagaccagcctgaccaacatggtaaaaccctgtctctactaaaaatacaaaaattagccgggcacggtagcatgcctgtagtcccagctactcgggaggctgaggcaggagaatcgcttgaacccgggaggcggaggttgcagtgagccaagaccgtgccagtgcattccaacctgggtgacagagggagactccgtctcaaaaaaaaaaaagccttccttggtttcctgccaatttcctgtcatgtttctttgtcccgaattgggccaatatccatgcccattcctaatacaattaccttaattgacttagattagccctgaagcatgtagtgatgtgggggaggaatgacaactgaagaaaatagaaaagaagggacaaaggttgttgagttggcaaccaacaattcctgttatagctttttaaattaattcactttaagtggtactgattattcatattgttatttccatgtatagagagagaagaaattggaggcttagaggaagtgaagtgacttgtccaaggtcacatagctaagtggaatttattttttttttttttacttttctgagacaaagtctcactctgtcgcccaggctggagtgcagtggcgtgatcttgactcactgcaacctctgcctcctgggttcaagtgattcttctgcctcagccacccgagtagctgagattacaggtgtgcaccagcatgcccggctaattttttgtatttttagtagagatggagtttctccatgttggccaggctggtcatgaactcttggcctcaagtgatccacctaccttggcctcccaaaatgctaggattacaggtgtgagccacggcgcccagctactggaagtcatgatgcaagctgttgtttgaatcatgaattccaaacttaatgagtgctaggttgaagttattttttttctgtttcccttaatcttctattgagatataacatgtattgaagcacagacatcttttgcaagaattcattgagcactatagttatattcatctgtacttactgtctccctggtaaaggcataaactcccttcaagatggggacatggttttatactttcctgaatctcctttagtgcttatatctaacagcacttaaccaggatctggagggggtcaaccagtcttgcttccttccaatctactctgtagatgtttgtgtttttctactgtaactatagaggtaaaggagccaatggtgtttccagtgtctggcacataataggtgctctatgaatgtcaaatgaatgactgaggcataaaaagttcttcctatgacataagtagtataataggaagatcactgggatagaattttcttagaagacgtggctcctagtcctagcactattactcttactgactataactttggacaagtcatttgtttaatttcaaacatttactgaattctgtgtaccaaatactgtacaagttgttcaaaaggctacagagtctctactctcaaagtctagtcaggggagagattacacaggagtgaaaccccatctctactaaaaaaaaaaaaaagaaagaaaaaaatagccaggcatggtggcaggcacctgtaatcccagctcttgggaggctgaggcagaagaattgcttgaacccaggaggcagaggttgcagtgagtcaagatcacactactgcactccagcctgggcaacagaacgaatatctgtctcaaagaaaaaaaaaaaaagaaaaaaaaagtatgtttagagatccttaaggaagttttgaacctatccaatatgttgggagtcaagatgaggagggtaaaagtaggaattcagagaaaggataaatattttgaaggaaggcagcataatggttaactagtcagactgcagacaaacaagcagtacaaatcccatgttcccaggtcttagctggaggattaaatcccagattctcatccttgagaacctctttaagcttgttttcccatctgtaaaatgtagatgataatagaatccttttcctactgtaaaatgatgcacattgggggcttcatgtagccagatatataataaatcctcaatacatgtagcagtggtaggggagaactaaaagacttgttaacatattggatgtaggtgagaaagaagaatcaaaaagaatatccaggttcccgccctgggaggggcagacataaatggagccaggaatggtacaaggagctttgtggtgggcactcactagtacctttctttggaatagctcaacaaatgttcactaagtacacataaagtcaatataacttgatgagctagagttaggctaagatgttgagttagcagaagagtagtacccaactaagggcttgaggaaggcttcctagaaaagataatgggtgcacgtagtcctgaaggatgagcaaggcttgcgaggagggaaggtaggaagggcattccagacaaagggacaaacatgcacaaaggtgagacagagcatggtgaacacacaaagttgtaggcattttgtctttctaggacacaaaaaacaaggtgatgaaaacaaggctggagagacaagcggagaccacaagtggtcacccctcactggcctcgctgtactactggactgctccagcccttcctggcccagagctagagatggcaccacccccgcactgtgcacacaataggtacagacactctcagccccaaacccctccagcctgttactgtgagactcacacatcctgttttcccaagcttgccccacagggtgagcaaactggaccagctggattagagtatttggaaaagtgcaggtggagtttctaggctatgccacgtcaggccagggggtgagatttttttcccttcccctggtctttgggctggggcactccctgaggagggaggggtgtgacccatcccacccattggtggtccatgatccattcatccagtacatcatccataagcatctgctgagccgggcgcagttgctcacgcctgtaatcccagcactttgggaggccgaggtgggcggatcatctgaggtcaggagttcaagaccagcctggccaacatggtgaaaccccgtctctactaaaaatacaaaatttgccgggcatggtggcgcatgcctgtaatcccagctactcgggaggctgacacaggagaatcgcttgaactcaggaggcagaggttgcagtgagtcgagatcgagccatcgcactccagcctgggcaacaagagtgaaacgccatctcaaaaaaaaaagcatctgctgaaggcacagtattgtgttagaggcttggactaccctgaggaataatagtcctgacacttgaggacatccccatccaattggaaaggcactggataaacatctaagaaaatgtcacaaggcataaaagctgtaataataatagctaacttgtatttagggtaaacaaaaggctgaatcaggctttggactaaatattttgcctgtggctcatttaatcttaataacaaccataagattatctcattttatgatgaggaaactgtatacagagaggtgattgacttgcctaaggttgaacagcttatgagtagtagagccagtattcaaatccagtcagcctccagtgtcccctctctttagtcattagatatagtgctacccagagaatctgctaagccttatagataaatgctatgaattcagaggcaggagcaattactgtggcttgggggcatccacaaagactttctaaggtggtgacacctgatttgggccttgaaactggttgaatagagataagaaaagaacagataatcaatttaactgccgttgtgttttgaatcatcactttaagcctagaatgacaaagctggaaaagaccctaaatatcatctagcccagtggttatcaaattttcttaggatgtggacatttttctttaaatgaaacatgagtagaagccagatgcagtggctcatgcctgtaatcccaactacttgggaggctaaggtgagaggattgctcaagcccagaagttggacaccaacctgggcaacggtgagaccttgtctcaaaaaagaaagaaagaggccgagggcggtggctcacgcctgtaatctcagcactttgggaggctgacgcgggtggatcacttgaggtcaggggttcgagaccagcctggccgacatggtgaaaccctgactctactgaaaatacaaaaattagtcaggtgcagtgctgcatgcctgtcatcccagctactcgagaggctgaggcaggagaatcgcttgaaccccagaggtggaggttgcagtgagctgagattacaccactacactccagcctgggtgacagagtgagactttaatttcaaaaagaaagatgagcagtaatcttgtctcttaaaaaggaggaccaaacattccctagccccaaaacattccctgaaaagttcagttgagaaccactgatctagtccaatgtcctgggatcctcgcttttatctttgctatctggagaaggaagagacagcggtagttcccaaaagacacaaacaatggggacattttaaacgggagtaaccagctaagcactctgctgctgctgcttgtctatttgccctcttgtcctgcctcagggtgaattgttggcagctacaaatggcaaccaagagagaatggagttggggcttagaagtgcggtagaggaatatgaagggggctggagttggagaggctcttaaagaaagagctgactatattgggactggagagttaatgtaaatctcttcttggttcatggggattttgttgttattgtttttttccccatgacacaactctcaggagatcctgagaacacgtgccctgatttggggggggttttaattttaactttttttttttttttttttttttgacagagtctcactctgtcacccaggctggagtgcggt[133 bp omitted]gacggggtttcactatgttagccagaatggtctcgatctcctgatctcgtgattcacccgcctcggcctcccaaagtggtgggattacaggcgtgagccactgtacctggccaaaatttttttttaattagagacagtctcttgctgtgttgcccaggctgatctcaagcagtcctcccaccttggcctcccaaagtgctgggattacaggcgtaagctatagcacccagccttccttctttccttaattctatttttttttttgtttgtttgtttatttgtttgcttttgagatggggtcttgcactgttgcctgggctggagtacaatagcgtgatctcggctccctgcaacctctgcctcccaggttcaagggattctcctgcctcagcctcccgagtagctgggattacaggtgcctgccaccatgcctggctaattttttgtatttttaacagagacagggtttcactatgttggccaggctagtctcaaactcctgaccttgtgatctgccctccttggcctcccaaagtgcggggattacaggcatgagccaccatgcccagccttccttaattctattaatatatgaatccttttcttttttttaaaaaaaagagatagactcttgatctgttgcttaggctggagtgcagtggcacaaatcagagctaactgcagcctcaaactcctgagttcaagcaatcctccagcctcagcctcccgagtagttgggaccacagttgggaaccactacacttggccctactacgggtttttcctgtttgtttgttttttgtttttttgtttttttgtttttttgttttgagacggaagtttgctctcgttgcccaggctggagtgcaatggcgcgatctcagctcactgcagcctccgcctcccgggttcaagcgattctcctgcctcagcctcccgagtagctgggactacaggcatgcactaccatgcccggctaattttgtatttttagtagagtcggggtttctccatgttggtagtcaggctggtcttcaactcctgacctctggtgatccgcccatctcggtctcccaaagtgctgggattacaggtgtgagccaccgcgcccagctgtttgtttttttgagatagggtctcactctgttgcccaggctggagtgcagtggcatgaacatggcttactgcagccttaacttcccaggctcaagcgatcctcccttctctgcctcctgaatagctgggaccacaggaatacaccaccacacctggctgatttttaaattttttgtagagccagggtctctccatgttgcccaggctggtctcagactcctgggctcaagtgatcctcccacctcagcctcccaaagtgctggggttataggcatgagccactgtacccagcccccttcagggtcttatctttataaggggtggggggtggtcagcacctttctcattgttacctctaccttccctaggtatgtgcaggtgaaatttgtctgcattcggacccaatcaaacaggaagagaacgcgggaggcagacatgtgcccagcgtacttgctcctaaggtacaacgagagactagatagactatttatcagtgaactaaacacacagcacatacatggtgactctaaagtggctagtcctggaggagacaccactggcaaatctcaaaagacaatgtgcctgcagagactccagcctgtgcagcccacaaccaaaaaagaccttgacactgccgagaagtccctggttgagccatcgttttgcctagataaggtacaagtgtcctcaaagccagagcaggaaggcatcactccttctgacctggccaagatagcaaaagtgatgaagaactttcttaaggtagatgagggttccatggcttccttcagtgtgggtgacagccagcacctggaccggctcagcttccagagcagtaagatgaccgacctgttcatccgcttcccagagaatctcttgctacaccgggtggagaacacccagggccacatcctctatgctttcttggtggagaacaaggaacgagaaagtcgagtggtgcactttgctgtgctcaaggcggagacagtcacctctgtggccaagatgctgagcatcttcacagagttcaactccgattggcccaaggtcaaggtggtctttgtggacccttcattccattaccgggctatcctgcaggagatctttcctgctgcccgcatcctcctttccatctaccacacaacccgactcttggagaagaagttgcatcgtagttcagcaaatccatcctttaaaaggctcatgaaggaagccctgcgggaggccgtgtttgtcacttctgaagccagcctgaaaaatctctgccagatgtcccaggccgtactggatgaggatctcttcaacttcctgcaggcccactggttcacctgtgaactgctgtggtacatgcatgttaggaagggcctgcttgcgtgtaacacctacatggacagcctagacattgtcaccagcaaggtgtcaagcctctttcgggaacagcagtcgctgctggactgcatcctctgctttgtggattacatagacttctttaataccaaaggcttgaagaacttgcccacacctcctcccaaattaaagagagctcggccggcaagcatgccactgaagtccaagaaggcttttggaatctgtggagagagccttaccagcctccctgcagaagagaccaagccagacgcacagcaggtacaggtacagcagcagtcacaagtgccgccctcgcaggttggcatgctggacaccttgcaccagagtggctctgaactagcctacaagctgtgccacaatgagtgggaggtggtacagaactccacccacctggtggacatggctggctcttcagtggacgttcagctgctagaggactctcaccaggttagcaaagatggctgtagctgcagctgttcctttcaacaatggtaccacctgccatgccgacacattttggctctgctgcacaccagccagcagccggttggtgaagccatggtgtgccgccggtggcagaagaagtaccagtacctccttgggcccaatggggagctccaggatcgtggtatggtcccaaacacaggccagcctgagaagcaaggacggaacgacatgattcaggacctaagcagggagttagcaaacctgctcatgcagaccgaggggccagagctggaggaacgctactccaccctgcgcaagattgtggatatctgggctggcccctcccagccatctgagctctttcagcagccaggagactttaaggacgtgggccgcctccctttcctctggggaaagcaagaagaaggggagggattccctcctgctacagctgtgatgcattattgaagcactttagctgaagcattggaccacaaacacttctccttggaagtgtgagagtttaaagtgggcaggacatactagggtttagcattttagccaatgtcttcctaggtggggctaggaatattgttacagtagagaggaagggaactccactgtgtgacagtcctttcaatctgccccttttcagccctacttttggcattccttgggagcctcagttgttgttcaaggccaaagttatctccgtgctgcaaggtcaccctcttcctcccccagcccctgagatcagatcttatttgctctgcaaagatgaatccctgcctcaggttagggtgagacaaaatcggtctggtaaaagggcctgttttcagggacaaagggaatgaggatgatctttggctgttgctgctctttatgaagaatcttatttgtaactttttattcatattaaagttgtttttaataaaattaaacaagggaaatgtgttctgcttgatcagggaaggaagaggaattgcatagcaataggactcgactttacagttaggaagtggctgctctaggtggatttattaattttaaagaaaattgaggccaggcgcagtggctcacactcataatcccagcactttgggatgtcgaggcgggtggatggatcatctgaggtcaggagttcgagaccagcctggccaacatggcgaaaccctgttctactaaaaatacaaacattagccaggcgtggtggcgcacctgtaatcccagcttcttgggaggctgaggcaggagaatcgcttgaacccaggaggcggaggttgcagtgagcctagatcgtgccaccgcactccagcctgggtgacagagtgagactctatctcaagcaaaaaacaacaacaaaaaaaaaagaaaagaaaattaagtattagcaacctaatggggttgtggagccaaatagaacctgatgcctcacattcaaggatttggcaatctgcgtcttaatttgcctccttcctacaactaagccttcaaggttgatttcaggtttccttatattctagcgggaagaggccaaatagactggagggtgtgggggaaaaacctgaatcttagacttgactgccagcaacttgctggggaactgtgggcaatttctttgacctcagtttcctctgtaaaaattagcatgttggcctgttctaatcccagatttcccctctaggtttacataagcacctttttgttttttgttttgagatggagtttcgctcttgttgcttgttgcccaggctagagtgcaatggcagaatctcggctcactgcaacctctgcctactgggttcaagcgattctgcctcagcctcttgagtagctgggattataagcatgtgccaccacgcctgcctaattttttgtatttagagatggggtttcaccatgttggtcgggctggtcttgaactcccgatctcaggcaatccacctgcctcagcctctcaaagtgctgggattaaagggatgacctactgcacccagcccaataacattttcgatgcgtaagtaccaacactgatttgatgttgctagttggtaatcttaatcctccaaggcctggtaaacacccagttttctaagtctgccatcttcaagggaactgaggacaagagaccagttagtaggcccttgcactactgtagtaggaccctaaataagtcatggcatcattctgtagaatactggagggggttgggctagagaatgccaagttttggcttgtttaaggggatctggatttcctcagctctaaaagttgggctcctgatccccgaaggaggagtagaatttgagacctggaactcagtttccccataaggtagaatatgcgttatgactatatatgcactgtttcctaaattccaggggctttagagtttcacacacacacacacaacaaaacaaaacccgcggtggctcacgcctgtaatcccagcactttgggaggctgaggtgggcgaatcacgaggccaggagttcgagaccagcctggccaacagggtgaaaccccgtctctactaaaaatacaaaaaattaactgggcgtggtggcgggtgcctgtaatcccagctactcaggaggctgaggcaggagaatcatcgcttgaacctgggaggcggaggttgctgtgagtcgagatcttgccactgcactccatcccaggcgacagtgcgagactccatctcaaaaaaagaaaaagaaaaaatatatatataactgctatttattttccttttcattttctgcttttgagggagtttccatagtaacgtgtccttccagtcgcctagcctgaagggaagccccggagctccagcttcaaggctcagctctcccagatgcaagtatctttacctccagccagctccttgtaaccctggcaacacggcccgcccgcgaatcgtcacgctacgattggtccgtggtgctaaagcctgaaagcgaattcctcagacattggtccgagtcactgcgatgctgacgctgtggttggtgagtttggatgtcagtcagagtcggaggcagggtcaaatagggagaaatggcgacggagcctggctgtgggtgagtgcttcctgaaggggtgaaagtgtgagacagcggatcaccgcagttagccgtcacacagctcccaaagggatgggagggaggttttcttctcatccggctccagctggactctgggaatgtcagacatccacatctcccacccaggttagaggtgagaggtcaaaggccgtattccctctgttggtttttggaccccaggtactgtggacagcagtcaggatcccgaaccaaagactcaactttcagctacttacagagtaatggtgggcaagtcacttagcttctttgagccttagtttatcatctgtaaaatgaggacagtaactcggtctggggccaaatagaggaaacaatggaatagagtattgctgctaaaagagggatatagtagaggcaggagaagctatgcacatttgttagccatattttatggtggaagggattgaggctcagagagggtcattgacttgcccaagataacacagcaagtttggagcaattgcagttctcttatacataccaggaccaaaggaaagaatggatgccaatcagtcatttataaatataaaatcgtatttttattttattttattttttgagacagagtttcactctgtcacccagagctggagtgcagtggcgcaatctcggctcactgcaacctcagcctcctgggttcaagcaggtctcctgcctcagcctcccgagtagctgagactacaggcatgggccaccatacccggctaattctttttgtatttttagtagagacgggttttcaccatgttggccaggctggtctcgaactcccaacctcaagttatctgcccaccttggcctcccaaagtactgggattacaggtgtgagccactgcacctggctagaatgctatttttttaaaaggccatatgcagctctggccatacctatttaaatcccctggaaccatatctttccatagctaacttcttatcatttagatttcagctccaatgtcatccttctcccctgagaggccttccattaccactttaactaaagtatccctcccttccccagcttactctctgacatgttactcaggtttatggtctttgtaagcttcattattggatatatatttgcttatttgtttacatgtttattgtgtatcttcccctagaacagtgctgacatatagtaagtgttcaacaaatattgtgtggatgaataattgaagagccaggtccctgctgtctccttaaacctctgttactctccataggcccatctttggaaaaaagatctgggaatgattgtctagcctccagcctcaacttacttgatgcttgagagactcaaagccccgtggtcagctgccctgcaaagaaagtattttgaccttggcatttggacagctcccatctctcccatggccctgacaatgctgaatgggctcctgattaaggactcaagcccacctatgctgctgcaccaggttaacaagactgcccagttagataccttcaactaccagagctgctttatgcaaagtgtctttgaccatttccctgagatcttatttatccaccggacctataacccaaggggtaaggtcttatataccttcctggtggatggacctcgggtgcagctggagggtcatcttgcccgagcagtctactttgccatccctgccaaggaggacactgaaggcctggcccagatgttccaagtattcaagaagtttaatccagcatgggagagagtctgtaccatcctggtggatcctcatttccttccactgcctatcctagctatggagttccccacagctgaggtccttctctcagccttccacatttgtaagttcctccaggccaagttctatcagctgtcccttgaacggcccgtggaaaggctgctcctgacctccctgcagagcacaatgtgctcagccacagcaggcaacctgagaaagttgtatacactcctgagcaactgcatccctccagccaagctgcccgagcttcactcacactggctgctcaacgaccgcatctggctggctcaccgctggagaagccgagctgagagcagccactacttccagagcctcgaggtcaccacccacatcctcagccagttctttggtaccaccccatctgagaaacaaggtatggcttctctgttccgttacatgcagcagaactctgcagacaaggcaaacttcaaccagggcctgtgtgcccagaacaatcatgctccctcagacaccatccccgaaagccccaaactggagcagctggtagaatcccacatccagcactccctcaatgccatctgcacagggccagcagcccaactgtgcctgggcgagcttgctgtggtccagaaatccacacacctcattggctctggctcagaaaagatgaacatacagatcctggaagatacccataaggtgcagccccagccccctgccagctgcagctgctactttaaccaggccttccacctgccctgccgccacatcctagccatgctcagtgcccgccgccaggtgctccagcccgacatgctgccggctcagtggacggcaggctgtgctaccagtctagacagcatcctgggcagcaagtggagtgagaccctggataagcacctggcagtgactcacctcaccgaggaggtgggtcagctgttgcagcactgcaccaaggaggagtttgagcggaggtatagcaccctgcgggaactggccgacagctggattgggccttatgagcaggtccaactctgattattctcgatgcccagagatgctcatgcacctgtgcacactcacatccacccatacacacacacacacacacacacacacacacacacacactcccttacactgttgtacttccgtgggccctccttccagaacaaggacaacaaggacaaggttgaagggtcttctcatctaccatggcctgctacctagcatgtgtctagctcaatgagacaggagtcagcaaatcttaatctgtttagtttactcaggtggccacatacagtctctgttgtatattcttggttttgttttaatattttttttctttttttttttttttttttttttgagaaggagtctgtctccgtcacccaggctggagtgcagtggcgcaatctctgctcactgcaagctccacctcctgggttcacaccattctcctgcctcagcctcccgagtatctgggactacaggcgcccgccacaatgccgggctaattttttgtatttttagtagagacggggtttcaccgtgttagccaggatggtctcgatctcctgacttcgtgatctgcccgcctcggcctcccaaagtgctgggattacaggcgtgagccatcgcacccggcctgttttaacattttcataaggtaaaaacctttcttagctcaaaggtctttaaaaaagcaggcaatccagctgggcatggtggctcacgcctgtaatcccagcattttgggaggctgaggtggacagatgacttgaggtcaggagttcaagaccagcctggccaacatagtgaaaccctgtctctactaaaaatacacaaattagccaggtgtggtggcgggggccctgtaatcccagctactcgggaggctgaggcaggagaatcgcttgaacctgggaggcagaggttgcagtaggccaagatcctgctgccactgcactccagcctgggagggtgagactccatctaaaaaaaataaaataaatggcaacccctggtctaagataagagataaaacatcaggtggtgaggttgaggtttggggcttggtagcagttgccccagtcatgagatgactcacttaacccgtctcctttaagtgagctgggctgggaggcttcctacaggggaagaggcccctctggggagctgactcagccaggctccctgaacttttttccttgtcccatcctggggtcaataaaactgaatgttgcatattctagcacttgtctagttttttttttgttccatagaaggcagtttagggtatatcatggagagaatagactttagagtgttatacaacatgtgaatcctggttggttccttccctgcttgatttttgtgcctggttctgccttttactagctatgagacttattaggataagttacccctctaaacctcaacctgattatctgtaaaaatggggatctccacagggtatgttcacagagcaggcatacctagtgggtgctcaattaagtattaattttccttccttgcctatggtcctatgacctgccttcaacatgctgggaaatttaaggcaagaggagaattcaaatacctaggacttaatataagaaattctggccaggcatggtggctcacacctgtaatcccagcactttgggaggccgaggcaggcggatcacctgaggtcgggagtttgagaccagcctgaccaacatggtgaaaccgtgtctctactaaaaatacaaaaattagccgggcgtagtggcaggcacctgtaatcccagctattcgggaagctgaggcaggagaatcacttgaacctgggagacggaggttgcagtgagccaagatcatgccattgcactccagcctaggtgacagagcaagactctgtctaaaagataaaaattaaaaaaaaaaaattctgggtaggccaggtacggcgtctcacgcctctaatcccaacaccttgggaggccaaaacaggcagattggagcagcctgggcaacatggcaaaaccccttctgtacaaaaaatacaaaaattagctggatgtagcacgtgcctgtagtcccagctactcaggaaggctgaggtaggaagatcacttgagcccaggaggttgaggctgcagtgagctgtgattgtgccactgcactccagcattggtgacacagtgagaccctatctcaaaaaaaaaaaaaattctgatcaagtcttcaaaacaacataaaagcagccttaactctccaagcaggggcccctacctcagataatttccattgtatctacctgacaaaacctatctcctgtcttagtggtatctggagaaactttagggtctggaagtccctgatgaaggactggaatttgtcagaatggctcaaccaccagctctatccccatccctgccataggccctcctcccaaccctgtctgcccaagaaccatacggagaaaccaccctacatatctggtgctatttcatccatctacaagcaggagccaggaggctggccccttttagatctcactaggggcatcttcccagaggctgtgtgggcatgtgcctgctcccaccgcgccccctccacagcaccctctggctccggatgggccatcatgaaagcttgagcggcccagatcaggtcctcttcccgaactcctgggacgggcacggtggggatgccagcgatcatcatggcgagggtgaggatgcagatatcaggctgggagctggcctccttccccactgcctcagagggtaccggtagaacccgtggtgacagcccacacagcatcaggggcctaggcctgctggggccacccaggtcaggggctctgcttctggagtagccattgtcccagcccaagctctccagctgcctcacatgcgggaatttgtggcagtttcggctgtattccttccgtagtgtctcccagctagtccccccagggcagcccctggcttgtggcattgccagggctgggccccaggcctgggcagcaggtgccacctgctcagctttctggctcagtgggcctgttccaccagaggccaccaccactggctctacaggactacagaggccaagggacaagcctggagaagcagccccacctgcagagacaggaatgaaatggaacgttattctcagttctttgaggagggggccctgaggggcagggcatgggagcagagcttgggggcgtaactaagaccagccccagcggactgtctagaggttgggaactaggtgttactcatatccacactcccagtccccaacacggagtaggtgatggagaagcgtttgttgaattaatgaatagtgagcaagcgggtagttattgattggcaaggatgtttggaatggcttttcttctaaaagaattgattctagggccagcccccaaatgcccagcagaaccgccacctccccagagccagaaagcaacttctcaggggaagctgccgcactccctccaattgcaggtgccccccgctcaccttggccggaaggcagaggacctggatgagtttgtggagtcctgaagtaggacatggcttccccaaagccccggtttgtgagggaatagtgatctgccgcctgtcctcccttcttcacccttctagaatgtcacctcatagaccctccccttcacacttggaatccactttacagcgttgacctattcattctagaacctggacatgacaataggatgaggttaaaagagcaccagaccaggagctgggtgttctaggttcttgccctaaccttgaacgagtcacccagatagttttgttccttgatatccttatctgtaaagtgtgtctgatgactgcccactacctcattaggagttttgaggatgaaatgagatcatttgtatggaagcagatgaccagagatggaaacacaggagccaagtgcttcgtgccttgtagagtaagacttcgggtcagacccagtattggtatttttctttttctttttttgagacagagtctcactttgtcgccatgactggaaggctggagtgcaggagcaagacctcagctcactgcaacctctgcctcctgggttcatgcaattctcctgcctcagcctcccgagtagctgggactacaggaacctgccaccacacctggctaacttttgtatttttagtagagacagggtttcaccatgttggccaggctggtctcaaactcctgacctcaagtgatctgcccacctcggcctcccaaagtgctgggattacaggccaggtattggtatttttcaaaattcctcaagtgattataatatatgacaaagttggaaccttttttctagggacatacttctcaaccctggctgtacatgagaatctcttgagaagcttttacaaaacacaatgtctaggcctaatttcccaacaaatcaaatacgaatccctagggatgggatgtgggacaccagcactctttacatatcctaagatgactctaacaagcagccagcctagggacccctgctcttttgctccgacctgctgacctgcagtgattctaaacgaagtgactctcataggctgtaggggcaaggagaccttccagtgatcaagatgtcagcatcggctgtttatttctggtcttggctggcagcaatgtggccaacttcggaccagccagccacaggtctggggctccaggatgcagctgtgctctggtgcactgtgggtcttcactcatacttgcagaaatccttaagttctttgggcaggtggagcccatcaatggccagccggtgcaccatgctcctttgtatcactaggcggcacagagtctgcagggatggcactgtgggaagaagactgtgaaaggcaaactgaactggagggtgggtctgaggccaagatccagaaggtctaggtcatggtccccactttgtcattaaatgtgggcaagtccttactgctctctgggcccagcctgcttcatggggctgagagaagcacctcttcctgagagctgccacaaagctgcagccctgtttatatcataacacttagcacaatcccttccccattcacttagcagcttctgggggcaggggtagtgtctgatttgcctgtgcaactgaagcctccagcacaggcctggcacaaagagggttctggtgcattgagttcatgaaatgtgatgagaggtataactgcaatgcttaccagggctataatgaatcatactcagcattaagaagctctcagtctggggtttgttatgcctcgaagccaatagccaatatgcccaagtctatgagcatgtttctttcttttctttctttttttttttttatttaaagagagagggtcttgctctgtcacccaggctgaagtgcagtgctcagtgaactgcagccttcaattcttgggctcaagcgatcctcctgccttagcctcccaaatagctgggactacaggcatgcaccaccatgcccagataattatttaattttttgtacagatggggtctcactttgttgcccaggcttgagctagctagcttgcttgcttgcttgctttctctctcttcctctctctctctctttcttttttttttcagagtcttgctctgttgcctaggctggagtgcactggtgagatctcggctcattgcaacctccacctctcgggttcaagtgactctcctgcctcagccttctgaatagctgggattattggcacatgccaccacacccagctactttttgtatttttagtagagacaggctttcaccatgttggccaggctggtctcgaactcctggcctcaagtgatctgcctgcctccccctcccaaagtgctgggattacaggtgtgagccactgtgcccggccaagcatgtttctaagaaaagggcaaacaattctcaaagaggcccctaatatctaaaattggtttagaatccctgccctaggtgaatacaggaaacactatcaaaactaaaagggaacttgtagggcatcttaatcaatcaaccaagataggtaccaaggcccaaaaccatgtagaggcttgtgcaagatcacaagcagaggtgcaatttgaagctagattctcccactcttaaactagtgccggacagacgaaggcctagcacatgggctacggagccctagtagattccagtccccacactgagccaggaggggtcgctgcccagggatacctacagccatactcgagctggacaaggcgcacgctctttgtggaagcaaacacgtccaccaccgcgtagaggggctgcgcagctggcagtccccgggcgctcgggcccatgtcctcgccgttgatgatgatgtgcatgtcggccgtgccatcggggcgcgggcaaaagaggacacccaggcggctacggcgcgcggtcggaggcagcacgttcagctcatagagctggtccaagagatggctgtagagccctggccggctgcggcccaccaggcggtcccggggaatgcgaaactgctcaatgcgcagatatggttccacgaggagggttggaggtcggctgggggccgctgcctccgcctccgggcggccctcccggggcacgcggttgtggtggcgcgtgatggcgaagacccaggtgtggcccaggttgaccagatcgggcagagaaaactcgggaacgggggccagactggcggggtccagcgcggtcagaccgagacgcagatgtccgcaccagcccagctctttctcctcgatctcgaccaggaagacctggcccggggccagcggctcgcggctgaagcacacgccgtgggcgaagctctccacgcgtgtggcccgcgtcccagaggggtccacgcggatgttggcaccgtgcacccgatggaagcgggtgggagggggctccgggcgctcgagtccccagagtgcacccgaatccacgggctcggaggcagcagccatctctcggccatagggcaggccagctggcgccgggggctattttgggcggcgggcaatgatggtgaccgcaaggcgaccttgtaaggcatttcccccctgactcccttccccgagcctctgcccgggggtcctagcgccgctttctcagccatcccgcctacaacttagccgtccacaacaggatcatctgatcgcgtgcgcccgggctacgatctgcgaggcccgcggaccttgacccggcattgaccgccaccgccccccaggtccgtagggaccaaagaaggggcgggaggaagactgtcacgtggcgccggagttcacgtgactcgtacacatgacttccagtccccgggcgcctcctggagagcaaggacgcgggggagcagaggtgagctggcaccggaggctggaggggatccccgagcccgggatcggtgcgcggcagaggaggctcgcgggtgggagctggcgctggggccggggcttccctcgcggaggcgccgccagcaactccccgggggctgctgcacggaagcgctgaggagcgagtcaacagcccctctgctgcctcccgtagatgatccgagccgcgccgccgccgctgttcctgctgctgctgctgctgctgctgctagtgtcctgggcgtcccgaggcgaggcagcccccgaccaggacgagatccagcgcctccccgggctggccaagcagccgtctttccgccagtactccggctacctcaaaggctccggctccaagcacctccactactggtctgccgccctgccttctgggcgggattgggagaagagatgacggatgagggatggggggtagttctgcagacccctgaggatgcctgggagccgggagggctggaaagggcccctccaactgcgccaaccctgccctgacccccctcccaggtttgtggagtcccagaaggatcccgagaacagccctgtggtgctttggctcaatgggggtcccggctgcagctcactagatgggctcctcacagagcatggccccttcctggtgagtggacagcagggggaaagcacagttcccaaagtaaaaggctggggaaagcgagagaggggctttgtgattttccaaaaagtttccttccttctaagcctcgggattttcctctatgccattggctttgctgcctgtacctctcagaggttttacccacatgtaaagtgcctctcatggtggccctttccctccacccagctggcccttgggacttactcagccatctctttcctcctcaggtccagccagatggtgtcaccctggagtacaacccctattcttggaatctggtatagctggagctgtgggtgtgtctgggcacttggatggggtggcatttagctaatttttccctcccctctagattgccaatgtgttatacctggagtccccagctggggtgggcttctcctactccgatgacaagttttatgcaactaatgacactgaggtgagtctggtgcctgcccatctgccccaggctccccggtcctccatccatggcatgatgctgggagagagagcatggccttggagtctacttttcgctctgtcatatgctattgtggtatggtggccagtcacttcctcttgcacaaatagggtgggttaatgtcattatctctgaagttctttccagttcaaataccaaagcttcctgattccctctgtcttgctctgccatccccaggtcgcccagagcaattttgaggcccttcaagatttcttccgcctctttccggagtacaagaacaacaaacttttcctgaccggggagagctatgctggcatctacatccccaccctggccgtgctggtcatgcaggatcccagcatgaaccttcaggtgcagggtagctgcaggagggaagggaggtagcttgaggctgtggccttacagttagcaaggtcagactgactggtcaatgtccccatccaacccagcttcctgcataacctccccaccaccggctgccctaggtctgtctgtgtgcctcccacacaggaaactcacctgtcaggctgccagctctgtgttttgcattgagtggcctctcatacccaccggcctacataaaccaccctgggtttcagcttccggattgctgaaggtctgggtggtagggtgagggaggctcttcctttttgccctccacatgagctgagcaccctgggtgtttcacaggggctggctgtgggcaatggactctcctcctatgagcagaatgacaactccctggtctactttgcctactaccatggccttctggggaacaggtatgggatagggcagttgggcaatctctggggtgaggcaggtcacatgatctcaggtctgtcctccaggcacatgatatgacaggcccagcccaggtttatgagcagcaggtgggttgcagaaagaacctagtgctgaaaggccaaagaatagagatcagtttttctttctttcttttttttttttttgagacagattcttactttgtcacccaggctggagtgcagtggcacgatcttagctcactgcaacctccacctcccaggttcaagcaattctcatgcctcagactcccaggcagctgggactacaggcgcgtaccaccacacctgcctaattttttgtatttttagtagagatggggttttgctgtgttggccaggctggacttgaactcctggcctcaaatgatcttcccaaagtgctgggattacaggcatgagctacagcgcccagccagaaatcagattttaaaggaactaaggaggcctgtctgtatgaccctggggcacctctttgggagctagcttagatgacatacagaccacaccctgtgatatctttcccagtctcctagggtcagggaggttggtgggaggtggggggtatgctcgcctcctctgccttcctcttcccaccagcagctgatgcgcttttcactctcatctcctacaggctttggtcttctctccagacccactgctgctctcaaaacaagtgtaacttctatgacaacaaagacctggaatgcgtgaccaatgtgaggttctgccatcactttgcatgagctctcccatccctaatcctgagaacaggaccacattccctccttggggactccttgttctccgtccctcattgctttcttgcacctttaagcaatttagtgttctctgggacatgtgtctaagtgtgtattcccaccaccacctcctatggtggcaaatcccataacctccgtgaggagaaaggacttcttcacatttatcaaacacctgcaacgtggcaggcactgtgctgaactgtgtctatgtagattatttaagcttcaagattccccctcaaatgagatcatactacccacattttccagataaggaaactgagggctatgaattttgaaatcactgtctgaagtcacagtgttgggaggcagtgatgctaggatttggacccaggtctgggaagattcctgccactgagcctcagtttccctacctgtgaaaaaaagtgggtgaagaggtgaaatccaagagcagtaaatcttgggacaacttggtggggtcgtggagaggctggggatctgtaaagcatggtggcttggtgtatcattgcagcttcaggaagtggcccgcatcgtgggcaactctggcctcaacatctacaatctctatgccccgtgtgctggaggggtgcccagccattttaggtaggtgctgctgggtgcccctggagccaaccccagccccatctggaggctccacacccattcccccacctcacattgcaggtatgagaaggacactgttgtggtccaggatttgggcaacatcttcactcgcctgccactcaagcggatgtggcatcaggtgtgcgagggcgtgggcttcctcctggtgaggtgggggcagggggaggggcagggaagcagaggccctgacccactgtctgtgccttccaggcactgctgcgctcaggggataaagtgcgcatggaccccccctgcaccaacacaacagctgcttccacctacctcaacaacccgtacgtgcggaaggccctcaacatcccggagcagctgccacaatgggacatgtgcaagtgaggttccgtggccacctgtgacttggggtggtgggttgctggggcttgtgggcatcggcaggtttctcagggatcttctgtgtagagtttctcaatgagatgagctgtagaggatgtttaacatccatccctgacccctcagtggattgagagtcagccaattcattcttttatcttttttaaatttaaaatttttttgtttgagacaaggtctcactctgtcacctaggctggagtgcagtggtgtgatcatagctcactgcagcctcaaactcatgggctcaagcaatcctcccacctccccagtagctgggactacagacgcaccaccacccccaacaagtttttgtattttttgtacagatggtgttttaccacattgctcaggctggttttgaactctggggctcaagtgatctgcccatttcagcctcccaaagtactgggattacaggcatgagccaccccgcccagccccatttcattacgtagccacattggttgttgtttcacagttcactacagcctcaacctcctaggctcaagcgatcctcccaccttagtctactgagtagctgggtctacaggcacatgccaccattcctggctaatttttaaaaaatttttttgtagagacagggtctcactatgttgtccaggttggtctcaaactcttggtctcaagcaatcctccctccttggcctcccaaagtgctgggattacaggcgagggtccccacacccggccatcacattggttaataactattacttccgactgggcgcagtggttcacgcctgtaatcctagcacttttggaggctgaggtgggggaatcacctgaggtcaggagttcgagaccagcctggccaacatgaagaaaccccatctctactaaaaatacaacaattagccaggtgtgctgttgggcacctgtaatcccagctattcaggaggctgagggaggagaatcgcttgaacccaggaggcagaggttgcagtgagctgagatcatgctactgcactccagcctgggcaacaaaagtgaaactccatctcaaacaacaataacaaactgttaacttccatgtccagtctcctgtggccacccccccccacaaccccaagtaaaagggtaacactgggcccagcagggctgctcaggtccattttgattggtcagtgctcacactctaccctgttgtatgttgtgactcccacacctgctggcccctagacactaaatgccagatgcatcccagtcctcgtaacaaccaaaatgcgtcccttgtacatttctttttctttttttttttgagatggagtcttgctgtcactcaggctggagtgcagtgctgcgatcttggctcactgcaacctccgcctcccgggttcaagtgattctcctgcctcagccttctgagtagctgggactacaggcacgcaccaccacgcctggctaatttttgtatttttttttttagtagagacggggtttcaccatgttggtcaggctggtctcgaactcctgacctcgtgatccactcacctcggtctcccaaagtgctaggattacaggcgtgagccaccacgcccagcatccctgtacctttctaaatggtggtgagttgaggctgtctgaatcccagcccatccagcccaacatccaagtcagtcctagagaggtggcccccccccaaaaaggggagtggaacccagctgtctgccttctgggttggagcttggagataggagagaaggtctgatctgttgactacttttcgccccgacctggtcttcctggggcctgctcgtatgttcccggcagctttctggtaaacttacagtaccgccgtctctaccgaagcatgaactcccagtatctgaagctgcttagctcacaggtgagtggggagagcacagctggatcaccagcagccttaggaccccagagtagcacagcaagctgggggcccttgagacttcctgtcaggacaagggaagctgaaactccgaaaggcgaagcccagggtcctgtgattggtggggtcagaatttgaacctgggtttgtccccacccatgctgtcctgctataggaggcctaggggtctgcatcagccacggagtcttaagggtgagaagagcttcattcatgccaaaaatgggccagcagaggtccagggtgggaggagaccttgcacaaggtgatataggaagcactggcagggccaagttaggactaggttctgtccagcacagtggttaatagcatgggctctggagtcacatggcctgggtgcaagtccctgtactagccacataatcttgggcaaatttcttaaatatgagcctcaggttctccatctgtaaaatggggataataatgatatctaccttcacagataaaacatttagtagaatactggacatgcagtaagtcgttagaaaacatgaaaattccctggttcgtgttatctagcttggccccttgaatttcctgaggggtaggccttgaactagggaagggctggggactgggcttgttccacacccctcatttttaccccatcctgctttagaaataccagatcctattatataatggagatgtagacatggcctgcaatttcatgggggatgagtggtttgtggattccctcaaccagaaggtaaggtagagattcctggccctgggataggggctgctgtggaggattgggagcgggtatgcctgggagtggccagctggctgcctggctctggcccacagagggcaagtgtggaggaattcccagccctaaggtcttgctggtagctgtgagcaaggatgcagctgctgtaggctgatgtctttcctggtggggcagatggaggtgcagcgccggccctggttagtgaagtacggggacagcggggagcagattgccggcttcgtgaaggagttctcccacatcgcctttctcacgatcaaggtagggactgggcctgctgagagataactgggccggaggcaaaggagcaggacccacccgtcctttccctctggctgccttttaggctgggtcatgggtcaccatctggcccctgtatgggcaagtttttttggagaggggtggggagggttctgggaagaataaagggtttgggatgaaggaattgcccccgagtgagcagttatatggggaggagggaatggtggggtcaggagctcacgaacattgctcctcagggcgccggccacatggttcccaccgacaagcccctcgctgccttcaccatgttctcccgcttcctgaacaagcagccatactgatgaccacagcaaccagctccacggcctgatgcagcccctcccagcctctcccgctaggagagtcctcttctaagcaaagtgcccctgcaggccgggttctgccgccaggactgcccccttcccagagccctgtacatcccagactgggcccagggtctcccatagacagcctgggggcaagttagcactttattcccgcagcagttcctgaatggggtggcctggccccttctctgcttaaagaatgccctttatgatgcactgattccatcccaggaacccaacagagctcaggacagcccacagggaggtggtggacggactgtaattgatagattgattatggaattaaattgggtacagcttcaaatcccgtcttctctgtggcactgggggttagagggggcactacaggctatgaatgtgggaaaagaggggctgagaggggttggggtcctgaatgacagctgccagcttggggattgagggctcagacagctgctgtggacggtgtgggggcagtggacgccctgacatcagcaggccggttcttctcaatcacctctcgcagccctttggcaaagtggagatcagccccgatggtgaggaatccctgtgttggggagaggggagcctcatttattcattcagttattgaggccagagtttagagatcaagagacagagtgtttgtctttcaggaactcaatctaatggataattccatgtcaaggtgttaaaatgaggctgtaggagtgtagactatgggtgtcaaggagggcttcttggaggaggtgacctctgagctaagacctgaacaattagtaggtattgggatgggagaagagtgctccaagaagtcacagtgtgtgcaacggcttttaggagtctaagattaaaatgggaggggcgactggtaatgggggagctggggtcaggtaatggagggcactggggagctatagagagaggggaaggccctccctccttccccatcctgcccccactcaccgcatggttcgtcaccacctcatgcacaaagttgatgccctcaggtagtgggatctgcaccccacgccaggtccgctctgtgggtgggagcaccccgctcagtctgggcccgcccagttcacccctcctttcttcctccatcctcacaccccagccttaccattgagcatgggcatcaccccaatctgcagcatggtcttcagaggggcctgtaatgggatcagctgggaggggcgagggcggaaacagggcagtgagtcagggttgggtttgcctttagctgcccgcaggtgagcagttatatgaggagggggggatggtgagggtcaggatctcacgaacccagcccagcccacccacccttccccactcacagccagcgactccagtgcagaatggttggaatagattcggaacctgcgggaaagaaaggagccctgtgggcaggaagcctggaagctccccttcctcaggccacccaggcctacctgccagaggtgtctgagttgcaggctcagatgcccacctaggcacctttccaagtgctacaactttccaggtatcctcggggcagtcattgctgccacttgggtctccttttctccaagactgctactttttatttattgagcacctcttttttttttttttttttttttttttttgagacagagtctcgctgtgtcgcccacgctggagtgcagtggcgcgatctcggctcactgctccgtctcccgggttcacgccattctcctggctcagcctcccgagtaactgggactataggtgcccgccaccaagcccagctaattttttgtgtttttagtagagacggggtttcaccgtgttagccaggatggtctcggatttcctgaccttgtgatccgcccgtctcggcctcccaaagtgctgggattacaggcgtgagccaccacgcccggcctttattgagcacttctaatgtgccagacttctgctggtagctttgcaggtgttatttattttatgtaacaaaacttcacattgcttagttcctgtcagacactaagcatatttattttctttttttatttttatttatttttgagacagcgtctcactgtgttgcccaggctggagggcagtggtgtaattttactcactgtggctttgacctccagggctcaagtcagcctcccacctcaggcttccaagtagctgggaccacaggcgtgcatcactatgaccaactaacttttaaatttttttgtagagacaggatctcactttgtagctcaggctggtatcgaactcctggcctcaagcgatctacccgccttggtctcccaaagtgttgagattacaggtgtgagccactgcacccagccaacgtgtttaaaaagttaatattagtaaactgttttaaaatacagtaccaactggtttagtcctcaaaacaagcccaaggagtgggcactattaggatttgcactaatttatagatgaggaaaatgaggccctgcaaggttaagtaatttgcctgaagtcacacagctggaaagtgtcagaagctgcctctagaacctagggtcctaacctacattatctcctttaaccttagaacagcactgtccagtcagattttctgtgaaacgttttgtatctgcaccgtctactatggtagtcactagccacatgtggctaatgaaatgtggcttagtgcaactgaaaaactatttaattataattaatttaaatgtaaatagtcacatgtggctagtatctaccatattggatagcacagccctagaaggcagatgctacttttgcctgtattaaacacatggagaaaatgaggcctagaaagacaaaatgggctgggtgcggtggctcacgcctgtaatcctagcactttgggaggctaaggtgggacgatcacttgagcccgagaattggagaccagcctggacaacaaagtgagaccccatctctacaaaaaataaaatagtcaggcatggtagtgcatgcatgcagtcccagttactcgggaggctgaggctggacgatcacttgagcccaggaggtcaaggctgcagtgagctatgattgcaccactgcactccagcttgggcaacagagtgagactctgtctcaaaaataaataaatacaataaaataaggccaagcacagtggctcatacctataatcccagcactttgggaggccggggcaggtgaatcacctgaggtcaggagtttgagaccagcctgaccaatatggtgaaaccctgtctctactaaaaatgcaaaaattagccgggcgtggtggcgcacacctgtaatcccagctactcaggaagctgaggcagaattgcctaaacccgggaggcagaggtggcagtgagtcaagaccacgctattgcactccagcctgggcaacaagagcgaaactccttctcaaaaaaaaaaaaaaaagaataataacatttttaaaaaagataaaatggcctcaaggtcacaaagctgtgttgtgctgaggtttttgtcaaaacccatgttctgatctttgctgtgtgactgtgggcatgttatttaacattgctggacccatttgttcatctctcataatacctgccctgcctgcctctgggacatgtgagaatgcagaggagtcagactttaccaaagcactttggcatgcattaacaaagacagaccccagctctcagtggcttacaggtatcactgtactttaagcgcaacatccctgtggacaggtgtgattgtcctccaatcactgaggtgcagggaagtgcgcctgcctacctgcgcaggtccagctgcgtgcgcagggccttcccccggagagccatcttggcgctgagacgggcgtcctgcaggaacatggggaggaggatgttactgacccagaaggtcagtaacccacagcccatttttccctgacccccagccagcagcccccactctgggacccgtaccatagtcatgctggacagctggacctcaggctggtctggtgggaccagggcaatggtgacgctagcagtgacagagatggtggtgccagagggcttgatggtgcagcgcggtggggccaggacccgcagctccagcttcaatggggagtcaatcactgctgggctctgggggatgagcagcaggggcgggtcaagtccctgccatttcctttggagcccccagggaagaaggggaaggaaggcaggtgcagcttctgtcctctggggactctcatattgcaaatacagagggagctctggcttccaaaactctcacatctgcatctagccttcatgcctttgccacacaaagaaacaggaatgtgttcttctctttctgcttcctaaatacatctcaatattcaggtctatctccaatccagactctttgtggatgtcctttttgcattagtatctcagcccttgccatgtcttctgtttttgatatggagtctcactttgttgcccaggctggagtgcagtggcacaatctcggctcactgcaactctgtctcccaggttcaggcgattctcccgcctcagcctcccaagtagctgagattacaggcacctgccgccatgcccggctaagttttgtatttttaatagaaacggggtttcgccatattggccaggctagtgattcgcccacctcggcctcccaaagtgctgggattacaggcatgagccaccacacccaaaccccttgccatatctttttgctctctctctcctttttttttgagacagggtctctgttgcccaggctggagtgcagtggcatgatcacggctcactgcagcctcaacctcctcagctcaaattatcctgccacatcagcctcctgaacagctgagaccacaggttcatgccatcacgcctggcttatttttgtatttgttttttgttttggtttttgcttttgtgttttcgtagagacggggtttggccatgttgcccatgctggtctcaaactcctgggctcaagtgatctgccggcttcagcctcccacagtgttgggattacaggcgtgagccaccgtgcctggccatatcttctttctctaaactgctatgccttcttctataggcagtgaaggaatactataagatgcaactgcctaatcttcaccaaacatgattctaaacactgtatatgtgttggttcctttaaacctcataataaccatgtgaggccgatattattactgccaattttgttgttgttattttttacaaatttatttttcaggctgagtcgtcatggcagagaattgcttgaacccgggaggttcaattgcagtgagccaagattgcgccactgcactccagcctgggtgacagagtgagactttgtccccccaccgaaaaaaaaagatctgactaaaaatttatttttcaatagagacagtgtctcactgtgttgcccaggctggtctcaaactcctgggctcaagcaattttcctaccttgacctctcaaagttctcagagtataggcgtgagccatcatgcccagccatatccccatttttgagatggggaaattgaggcacagataggttaagtaacttgtagaggttatgtagttactcagtttcagaactaggcttgaagcccaggcagtctgacaatagagaccctgccctgccataaattggatgatgataatgactgaattatttcttttaaaatttgtaattctgctaggtgcggtggctcacacctgtaatcctagcactttgggaggccaaaaatgggtgatcacttgagcccaggagttcaaggacagcctgagcaacataatgaaactctgtctcaacaaaatataaaaattagcggggtgtggtggcacaagcctgtaattccagctactcaagaggctgaagcaggaggatggcttgagccctgggaggcagaggttgcagtgagcctagattgtgccactgcattccaacttgggtgacaaagtgagactcttgtctcaaaaaaaaaaataaataaaatgtgtaactcttactctcctccccaatacacaaataaacaaaagtatatgtgaattattattaaagccctcacacttgcaaagcttgggttctcactaatcctcacagcagctctgcgaaggagatggggcaggaaggagcaggaaggagcagaccgcttcacagacaggaacagccatgacaaggcgagggggattggccacagacaagaggccagggccctgtctgcgtggctgccactgggggccccacctgcacccctccttggtctcactggtgtgcaggtggccctatccctgcccccgccagcactcaccagcaggacaatgctcccaaagtaggtggccctcagcagcatgtccaggtcgtggggcacctgaacaggggaatcaggagtgagggagtgagctctgtcacagaccttctcttgcccatcccacaaacaggccatgacataccttgtcccccaccagcaacagctgcagggcccccgcccggaagtagctctccatggcagagtcgaagaagaactcagagaaggccacatacaccatccgctcttcctcctgcagctggggctccactgcccggttggggaggctccagttcctctcagtcagggggaagaaggccccctggggtggggcattcacagtcagggtcaaggcagactggcctggcacctggactgacagcaggtgtctcccagccccgtgctaggcactgtggggggatggtgggaacccagctgctgttcttggaggattcacaagcacatctcttaaaaggcattggaaggaggacacctgctaccagggggcgagcccgtcagactggaggagggagggtcaggaaaggtttcagggaagaggtgacatctgagtgggccttgaaagctagaggcagtaacaacagctactgtttacatatattgtgcatactcatgcttctttgccaagtactctaagctcttcacatagatcgacttctttaatctgcataacaacgtgtgttttcttactagattatttccatttacatgttaggaaactggccaactgaaaacttatgcttagggccgtgcagctagtcagtggcagagctaggatttgaacttcaggcattctttttctctttgtagagaaggaggtctcactatgatgcccaagctggtctcaaactcctgggctcaagcgatcctctcgcctgggcctcccaaagtattgggattacaggcatgagccactgcacccgactgattctagctcccgagtctgcactctgaaactgctatactcctctgggagaccaaaggtagtggctacacactggctatgtggccttgggcaagtgacgtcacctctatgagtaagtctccacattcctaaaattaggatgatgttagtacctgactcacagggttgtgagagaatgaaatgagattatttgtatagaaatttatgtccagctccttcgggggagttggggaaaggccgtgcatgagcaaaggccctgaggtgggaagccagggtccaatttgggaaagagcagctgcaaagaaacaggatgagatataaaaggtggggccaggtaagattaacaggggctcaaatgccagacccaggaggctgaacctaattctgtagtaacagggagccatagcattctcagtaatgggagtggcctcatcagagctgtgctttaagaagtaaaatcttgcaacttagcagagaaagaggtcttgttaggaagtcagaggtcatacaccagcccaagcagctcacccggaagtccatgtccaggttgctggtggaagccacaggatccttcatgagggaatagtcaatgccaacaagctcgtccacagaactgcgcactgcaggaaggggctcaagtcactcacggctgtgtgatgtgggataaggtgcttaacctctccaggctcagaggcccacccataaaatgaggatacatccttcacagggttgtcatgagggtcaaattagttttatgtggaaagcacttagggcctggtgtgtagttaggtgctcattaatgttagttattattattactaccactatagaggtttcaaaaaaataactaaacaagatggcatgggggggccgcgcatggtggctcacacctgtaatcccagcacttagggaggtcaaggcgggcggatcacctgaggtcaggtgttcgagaccagcctggtccaccacggtgaaaccccgtctctactaaaaatacaaaaattagttgggcatggtggtgggcgcctgtaatcccagctactcaggaggctgaggcaggagaatcgcttgatcctgggaggtggaggttgcagggagccaggattgcaccactgcactccagcctgggtgacagagcgagactccatctcaaaaaaaaaaaaaaaaaaaaaagatggcatgaggttcctttcccttggtttctcctacctcctccttcgcttcccatgcctgtgtgttaggtgtgatgggaaaatacctttgccccacagtagacagaggtcatggcttagaaaaagggaattcatggccaggcacagtggctcatgcctataatcccagcactttgggaggccaaggtgggcagatcaggaggtcaggagatcgagaccatcccggccaacatggtgaaaccccgtctctactaaaacacaaaaaactagttgggcatggtggtgcacgcctgtagtcccagctactcgagatgctgaggcaggagaattgcttgaacccgggaggtggagattgcagtgagctgagatcgcgccactggactccagcctggcaacagagtgagactgtaagactccgtgcaaaaaaaaaaaaaaaagaaagaaaaagaaaaagggaattcatgttaattgagcacctattagatgctaggtgatgaagacaaatgggatgccagtgatcagcatgcacatattgaggaccttgacaactattctctcagataatcctcacagcaaccccaggaggaggcactgccagccaagtgaggaaacaagcactttgcccagacagaaatgagcacttcacccaaaatcgcacaacaagtcagctccaggggccacatttgaacccaggactgttcaacagcagggctcggaaggggcctgctctgaggtgctgcatgacagctgcacacccagactcacccgccaccaactcaccaggcacggtgtccaggagggagttgagcaggaccgtccctgcgtggtagaggacagggcagatctgcgaggtgggagccagagtcagggccttctcaaagtgagagcatgcccacccttgccaccctgcgacctgtcgctgcccacacctgctggttgaggaggaagcgcatccctgaggtgatgaacgtggagagaaaatcatacaccttcctgtgaggagaggagaggccggatgagcccagaacctgcctccaccccagtccaggtccaggagaaatcagtgactagggaaatagtggcagtaggagtcctcagcttcagcctgaataacagctcctccacgtaggttttccaagaaccaggcccaaattccctctccagtctaattctcaagacctcctgacctactctctggtcccatcagtcaaatgaatccacccacattgcctcaaacccactctgagcatccccacatccatcggcttactgatgccctcccttccgccctctgcattcctactctgtattttcccatctgagctcagatgcttcctcttccaggcagtcttcccagattcccctcctctgaatccccaaagcattttcttagtccttctctccaggccctgatatcaaatgttttttgctccagataggctctgagctccttcctgcatcctcagggactggcatacactttgtttgatgaataaataatactgacagtgtaccaacaccaggttataatccatcatcttctctcccccatcctcttccagaacaagaacaatatccccttctcagcagcaaaaataaaaaaataggccgggcacagttgctcaggcctgtaatcccagcactttggtaggccgaggcggacagaccacctgagatcaggagtttgagaccagcgtggccaatatggcgaaaccctgtct[133 bp omitted]cactccaggctgggtgacacagtgagactccctctcaaaaaaaaaattattatttttgttattattatttagagataccaattattgagaatccagtacatggccaaatgtgcatatcagatagtcctcacagttactcttatctaagtggccagcacttaaatatacatttatcatatgccaggtgctgttctaaatttttttttttttttttttttgagatggaatcttgctctgtcaccaggctggagtgcagtggcacgatctcagctcactgcaacctccgcctcccgggttcaagcgattctcctgcctcagcctcccacgtagctgggactacaggcacgtgccaccacgcccagctaatttttgtatttttagtagagatggggtttcaccatgttggccaggatgatctcgatctgttaaccttgtgatccgcccgcccagacctcccaaattgctgggatttcaggcatgagccaccacagccagccttgttctaaatattttttacatataccaacacaaataatcctgacaacgatcttataaaataggatcttataaaatgaggatattgaggcaccaagcttcagtgacttggccacgttcacacagccaggaagtgacagagctgagctttggacccagttggtctgattcccaggcctatgcactttgcattgcgctaggcagatgagctgtggggctcgaaaagggtgagctggggttggggctggggcttacttgaaggttcccccgaaggccgcgtgcattctggagacagaggcctggcaggagacattggacactttcatccgtccagcgggatcccgggagagctccagaccagtgcggatggacacaccctcagctgaggcgttgatgtagcccccatcatagctgccaggggggttaatattcactccaggtaggagctcaattgagtcttcagtgcccccatgcatcaccatacctcttaataaggtttcacctctttccacacatcctaccaaaccttcctatcaactcgtatgaaatgcatatgcctgtttctgttacacagatgaagaaacggaaactcaggaaggctaagggggctgcccacagccccacagcacctccagccctcctgacccactctccactcccctgagggtgctgggtccttacaagaaccagtagagcagctgtctccggaagcgcagccccaaggaggcattggtgatttgaagcatcagctcctgctgtggctggaaatcgagctcggaagatgtcagttgcagctctgtgaccttcaccctacaggaggcctcagggtcagatccagggccaagaagagggaacttcccccaacgacaggaaatttgtctgctcccctttcaagtccaggcctggggaagcgggagtgggtggaatgaattcttccattgtccctcaagtgcccaacttagacttgggtggctcaaagttgaacttgggtggctgagagaggaggtcttcctgatccaggtgttaaaaatgagcttcaccccatcgcttaaaagtcttgtttgtttgtttgccaggtgcggtggtggctcatgcctgtaatcccagcactttaggaggccgaggagggcggatcacttgaggtcaggagttcgagaccagtctggccaacatagtgaaacccgtctctaccaaaaatacaaaacttagcagaccgtggtggcacgcgcctgtagtcctagctactcgggaggctgaggcaggaaaatcgcttgaactcgggatgcggaggttgcagtgagccaagatcgcgccactgcactctagcctgggcaacagaacaagactccctctcagaaaaaaaaaaaaaaaaagtcttgtttgcttgcaccccctcccctcccacaccctggggttgctacacccggtcttttaatagagtccgttcactttgcctccatcacctaagctccgtctcacatctcaattccttattccccctccctcatcctaaaccatacttagagccttcagtttctccacccctccgattaactccaccccgtgcccgagactccactctcatctattgggaagttccttgactccacctttctgttgttcttcgaccacgcctcacatccactggtcctgcttccttcttggccccctctacattttcaaggccacgcccatctgcctggtcccgcctatgatgactggcttggcctttatcttttcggccccatccggtttcttaagtcttgcctcatcgatttggccacgccccatcccactcagcctccagtctcccgagaccctgagatttctcgggccccgcctccaccgccgaggccccgccccggatcgcgaggccccgccccccacttactcagagatgttgtagtagaagtggccttctttgccccgcaggtccggaatggtgatagtctccagctcttgctccagaaagcgcagcccctcctgcttcactgaagcagcagagaaacccttacttagctcccgtgcccactgttggggcgaccccaaccccgtccgctcccgtccgtccctgtctgcccctgcgccttacccagctccagcgccttggaggtgacgcggatcttgcagcctgggaactctgcatgtgcgcctgccagcagcgctaggaagagggccccgaagagggccatggcgagcgggcctgggggtggggtggggtcgcaggagttatctgagccgcttaaacccattccttggacgtccaaccataagtgggaactagcctggatcgttaccctccagataactcttcggggaacttggaaccaataatcttgcctccatatggcagatgtggaaactgaggctcagagaggcgatgcgacttgcgttctggctcccagaggatttgggacacgggggaggggacgttcccagttccctcgtgctaccgccgcgtgatgagtttggacctccaggggaccagcccccacacccccaacaacctcccctttcctttagcggtgggcccatgcaggcttgcacgttgccacggcaacgactgcacgcgcattcttggagggtggcttgcggtctcctaggcctcgcgcccggggaggagaggaggtggccgaccagaccgtgggctcccgggtctcccggctccctcaggtcctaaatctctcccattagagattctgcctggagcccccatgttagcgttctccttcatcggctctcctccccacgccggcttcagtgcaccacgcggctcggcgagggactgggaacgggatagggacgcgccccaactcactcagcggtggagctggggggcggcgcggtcacgtgggatggcgggcagctcaggggatccgggcgacggggtctggcgggcagggttgttccagccgcctttataaagccggcctccccgacccctcctcctctctgcagctctcccctcctcccttgggggctgggaggggacggggcgggacgctggcagccgggagagtggaaaaggctgcacagagccccgtgacaagcccggccgctgtctggacaagtgggagacccaagcccagggagagggaaggaaatgcaggagccggcccactcagccccaacaatcccactttgctgggaccttggttcaaattacaattatccatgtcttcctgcatgatcttgggcaagtcacttcacttgggtcactgaccctcagtttcttccttcagcgaaatgtgcacgatgataggaactacctcttgggcctttattacaaccaggtccaggcacaaagtcaaggaatattttttctttccctgccacccacaatcatctcgggacctccttgcctggctttgctatgggcccccctacctgtctctgtgtcaccacctggggaccttaaggtcccagagacctttcccacttgggaaagcaagactagacaagtgctgtcagcccaggaacataccacaccggctgaaatcagaaggaggtctgccatttatcgtggctggtggattgttttttctattttttttatttttattttttgagacggagtctcgctctgtcccccaggctggagtgcagtggcgcgatctcggctccctgcaagccccgcctcccgggttcacgccattctcctgcctcagcctccccagcagctggggctacaggcgcacgctgccacgcccggctaattttttttgtatttttagtagagacggggtttcaccgtgttagccaggatggtctcgatctcctgaccttgtgatccgcccgcctcggcctcccaaagtgctgggattaaaggcatgagccaccgcgcccggtccactggtggattttttaatgaacccttggagcaaggtgctctgaacagcatccccgcccccacccccacccccacctccatctactgcttacagggttcccggaccctaggacagggcacagagtgggtgcttgccacctttttgttgccaaatggacgaaagaaaggggaagcaataatcatgtctgctgagcatgtatttagcaccaaacactcatctaggaaggatgactaactcatcctgatttgcctaggactttccccattgtgtcttttttttctgatataatccacagattcacaaaaatagttccatttccttttttatttaattaattaattaatttttttgagacacagtcgtgctctgtcaccaggctgcagtg[133 bp omitted]acagggttttgccattttggccaggctggtcttgaactcctgccctcaagtgatccgcctgccttagcctcccaaagtgctgggattacaggtgtgacccaccatgcccagcctatttatttatttttatttatttatttaagatggagtttctctcttgttgcccaggctggagtgcaatggcgc[131 bp omitted]tttcgctatgttggccaggctggtttcgaacgcctgacctcaggcaatccacctgccttggcctcccaaagtgctgggattacaggcgtgagccaccgcgcccggccgcctatttatatttttagagacagggtcttgctctgttgcccaggctggagtgcagtggtacaatcacggctcactgaagcctccacctcttgggctcaagcgatcttcccacctcagcctcctgagtagctaggactacaggcaggtggtaccatgtcatgtccagctaagttttgtattttttgtagagacaggtctcaccatgttgcccaggctgatcttgaactcctggacccaagtgatcctcttgccttgggctcccaaagtgctgggattacaggcgtgagccacacatccagccatccccattttgaaaccattcctgggaacccactcagtccctgggaaaccttacaactggtcatccgaattctaggtaatttatttaaccttaacaacctgtcagactggcactattatgaaccctctttaacaggaagtagaggttgaagcaattctgtggctgctattagggaatccgtagactgttcatggaagagtggaaggtgggctttatagcccggtagttatgtacttagactcttgtgtctgacagacaagagtttacaccccaggttgtcagttcttaggtgtatgacattgatcccttgcttaagcactcagatcttcaatttcctcatcctaaaatggaaacaataatttaaggttattgcaagaataaatgggcctggtacatgacacatcattagtgccaaataaatgctagctatcttaattaggggcacataccacgagcaaacaaagcagaaaaggtgtagagggagaacagagaaagtgttaagagtatccagaggaggaagtatctgtgttcctttgaactctagtaaccttcctagagcctggctcaagcagaaaacctggtggatgttagttttctttcctcttatttcctttcttttctttttttttttttgtggggtggagtctcgctctgtcacccaggctggagtgcagtggcacgatctcggctcactgcaacctccacctcccaggttcaagtgattctcttgcctcagcctcccgagtagctgggactagaggcgcctgccaccatgcccagctaatttttgtatttttagagacagggtttcaccgtgttggccaggttggtctcgaacttctgacctcaggtgatccgcccgccttggcctcccgaagtgctgggattacaggcatgagccagtgcacctggcccttttttatttttttttaacaacaacaacaaaatacattttatttatttaagatagggtctcaccatgtgctcaggctgatctccaactctcgggctcaagcaatcctcccacctcagccccccaagtagctgggactacaggtgtgcaccaccatacctggctgttttctcttcttttctttctttttttccctcttttttgagagagggtctcattctgttgcccagactgctgtgcagtggtgcagttacggctcactgcagcctcaacctccccaggctcaggtgatcctcccacctcagcctcctgagtagctgagactacaggtatgtgccaccatacccagctaatttttgtatttttcacagagatgaggtttcaccatgttgcccaggctggtcttgaactcctgagctcaagagatctacccacctcagcctcccgaagtgctggtgttacaccacatctggcctttcctctcgttttctttttctttttttcttttttttttttttttttgagacagagtcttactctgtcacccaggctggagtgcagtggtgctgtctcggctcactgcaacctccacctcccgggttctaagcgattctcccgcctcagcctccagagtagctaggattacaggcacacaccaccacagctgactaattttgtatttttagtagagatggggtttcaccacgttggccaggctggtctcgaactcctgagctaccaaagtgctgggattacaggcgtgagccagtgtgcccagccttgctctcattttcttaggtgaaatatttctcgctatattgcccttgctggtctcaatctcttggcctcaaaagatcctccgatcttggcttcccaaaatactggtattacaggcgtaagccactgtgcctggcctcactcttcctggctttgaagactgaaggagaggcttcccagcaatcaaagggatgggaaagaaatgcttttctagcctcagttgtgtacccagatgaatccaggcttcatctttgtatcatttttatctcttaaatggtcttgtcccatgcaattcactggccagtggcctaacccctctggatctcagtttcctcatctgtaagatgaggatgatccaggtacctccctcttaggattgcttgtgaggattaaatgagttaatgcattgaaagggtttaataagtacttggcatttcctaagggctcaaaaaatgttacctacaatcattagcatgatcagccatcagtggcttttcaccatactggaatagactcctgcctcagtaccctgattccctggcatgtgatagggcctactctctctgtctcacctctcacctctcttgccctttgcattcggctccagccaaactggtttttctgttccttgaatgtgcaagttcttcttgctcagagcctttgcatttgctgttccctctacctggaatgcttttccacctgatcttccttgtcattttgtctcagcttattttatttatttattttttgagacggagcttcgctctgtcacccaggctggagtgcagtggtatgatctcggctcactgtaaactctacctccagagtacaagcaattctcctacttcagtcttctgagtagctgggattacaggcgtgcaccaccacgcccagctaattttgtatttttagtagtgatggggtttcacatgttggccaggctggtctcgaactcctgacctcaagtgatctgtccgcctcagcctcccaaagtgctgggattacaggctcgagccaccacgcccagcattttgtctcagtttaaatggcgttttttcagagaggccttccctgcctgcctatctattaatcgctctcaatcatatcagcctggtttattttctttatagattttattactattgaatattttctttcttgtttgttgtctgtccccgtgagagctggaattttgttcaacactgtgtccttagtgcctagaaccatgcctggcacacagtaggtactgactaaatatttactgagtgattgaactggtttggagtccttgaatgtccctgggcagcaggcgatccctatgccaacccagatcctttatctcctcctgtaccatgttagcctcagttcaattgaccctaaacacagctctgaccggccgggtacagtggttcatgcctgtaatcccagcactttgggaggctgaggcaggtggatcacctgagttcaggagttccagaccagcttgaccaaaacagtgaaacc[136 bp omitted]cactccagcctgggcaacaagagtgaaactctgtctctaaataaataaataaatacagccttgacctgggctggtggaggagaaggtgcagtcactggccctgaatccagggccttccccactcagcctgtccctctttaatacattgatttcccttttcctctaaaacatatggtgcacacaaccctcaaacgttaagagtgatgtcagcagatgtgcagcgtgggatgggctctggcagcctcctcgagtgctcatcaccgggcttgagacatggagagagccaaatccccaaatcccttcccactttcactcctggttttgttgttgtttgtcttttgaggcagagtctggctctgcctattaagctggagtgcggaggcacaatcttggctcactgcagtcttgacctcctgggctcaagcaatcctcccacctcagcctcctgagtagctgggactataggcatgcaccaccacggctgattaatgtttgtaattttttttttttgtagagatgaggtctcactgtgttactcaggctggtctccatctcctggcctcaaggaatcctcccacctcggcctctgaaagtgctgggattacaggcatgagccactgcgcccggcctcatccctggctttgaagagagaaggagaggcttcccagcactcagagggacaggaaggaagtgcctttccagcctcagttgtgtacccagcacagcaatactggtaagaaatcaagatagcaaagtcctgcttctgcctttttctagaacagatgtcagcaagctgttcctgtaaaggaatcaggatagcaaagtcctgcttctgcctttttctagaacaaatgtcagcaagctgttcctgaaaaggccaaagtgtacatattttaggctttccacaccctgtggtctctatcgcagctgctcagccctacactttagcatgaaagcagccataaacaatatctaacgaacaggctgggagctggagttagcacacaggccatagtttaccaacccctgttccagaggaaatgaaaaatctctttctgggctaggcatggtggctcatgcctataatctcagtactttgggaggctgaggcaggaggattgcttaagcccaggagctcgaggctgtagtgagctatgattgtgccactgaactccagtctgggtgacacagcaagatcctgtctctaaaaaaaaaaaacactttttgaacctcagtttccacatctgtaaaatgggatgatctagtacttacctacctccctgggtggcagtgaggatttaaagtgataaagtatacaaagtgtggaacctagtacttggtggcggggtggggcgctctcactttgttgcccaggctggtctagaattcctgggctcgagcgatcctctcgccttggcctttcaaagttctgggattacaggcatgagtcactgtgcctggcctgattattagtattaatagttgtcatagttgcttaacaaacagaaagtgcttttttgagacagggtctcactctgttacccaggctggaaggcagtggcacgatcatggctcactgcagcctcatcctccctgggctcaggtaatcctcccatctcagcctcccgagtagctggaactataggcatgtaccaccatgctcagctaacttttaaaatttttttgtagagatagaatctcactgtgtagaccaagctgatctcaaactcctggcctcaagcgatctgcctgcctcggcctccctaagtgttgggattacacgcgtgaaccaccacacttggccagaaagtgcttccacatattaactcacttacacttcataacatcctacaagataggtatcctcacccccagtttacagataaggaaactgaggcccagcagttataagctcaagtcagtctggccccagagcctatgcttgtaactaggtttctctctctgtctctctctttttcattatcccatgtaactctcacagcagtgccttgagatagctattattggccctgttttgcagatttggaaactgaggttcagtacgaggaaataactggtccaaggaagtaaacacgggctccactgaccacaggaggccaagctggattgctgcccaacatgtcaacatgcactgctctggccccctcctccctcgctgtgcctccagctgtgttttctttggatctctgcatggcttggagaagctgcgtcagcccatctcctctcctgcccagtccccacccccaacgcccaccccagctacccctcagggagtgacccccttctcctcactctgcctgagcatatgagcactgcagctcatgcgcctgtgttggtcagcatgggtgcacctggggacatgtgacaggggacccagctggaatgagaggaggattatctgaggaggacaaatctcaggccaggaagaccccgattacatctctccagacaggcgaaatgatcatctgtttccagaatgcaactggacaaaacagtccgcgtgagggctggacatttaccaaatgggtaaaaggaatctaaaagggctggggcttgctgagttcagccaggccaaagctgtggactgactttccgtgatttctaaagctgggagatctgttgttttcttctttctttcccatttcctccttgaaggccagtccattttctgtgtgaagaacaggccacttggtgtctgaagtcacctccagattagaaactcaaggattctaaggttccttatgaggtgttgctttccctgggtcctcggtcctagggcattgtatccccacacctggtgcctctccatcagggctcggatgtcagccttgggcagctcactctctctctgacttcccttttcttttcttcttcatatcccacccttcttcccagtttctatgcctctgtcagtctgctagctgactctgactcatggggacctctttctgtggtcctctaagcctcctaaccgtctgtgctttccttatactccacgtgggctttccagcctctacttgttttgaggaagaggtggaggatccatagcagctctgtctagatgtttggatttcataagccagtcacaacatttcaaagtaagtgaagggagggggccccaaaggaagggattttttcctttgataataaggataggccaccatcttcagcctaagcttgtcccttttctgcagggcttgctgaaatgttgcaagaagtggtcaacataatgcaactcgaatttttccaggtgtcctaatactgcaggagtcccccgcataacccaggctttggtctaacaagattgccaacccctagccaggaatcatgaggatgtcaccgccctctggccttcttcctctcttccacccagctagatccatattttagctcccccccaaccctagcaagtaccaaatcctgctccttttccaagcttccccatcacaggtcatggcaccagctttatgcagtgctcaagtcaaaaatataggagtcatccttgacttcctttttttgttataccccacatcagcaaatcccggtgtctctaactccaaaagacgcctcaccttatgcctgtaatcaaagcactttgggaggctgaggtgggaggatcacttgagcccaggggttcaagaccagcctgagcaacatagtgagactttgtctctacaaaaaataattagccaggtgtggtagcatgcgccaatagtcccaactacttgggaggctgaggtgggaagatcgcttgagtccaggaggtcaaggctgcagtgagctgtgattgcgccactgcattcccgcctgggcaacagagcgagactctgcctcgaaaaaaaaaaaagatgccccacatctatacaattctctctatcagcaccaacaccacttcaagccattttcattggttaccgggacaacctgccttatctccctgtctcaccatttctcctgtaggtctagcctctctacatcaatctaagtgatatttttaaaaatgggaatcatagaatttttctatcctgctcaacatcctccccatcacacacaaaataaaacccagactctggccacgacctctggaaacactgcaggtgaactagctcctgcctaccttcctctccaagcccatcttctaccactgttgggaacacaccaagtgccttcagcctcagactttccttaattcttttctccaccagacacatcatcccacacacatacccatgcagagttactcagatccctactcaaatgtcacccccacagaagaggccccctctgtgtcattacctgtcattctgtttgtttaattctttattgcctgtttcttccagtagactgcaagctccccagggcggggacaggagcctgccactcttattcatggccatatgtccagtgcccagcacagggtctggcacacagaaaatgctcaatagatgtttgttgaattcaagatggccgggcacggtggctcatgcctgtaatctcagcactttgggaggtcgaggcagacagatcacgaggtcaggagttcgagaccagcctggccaaaatggtgaaactccgtctctactaaaaatacaaaaattagccgggcgtggtggcacacacctgtagtcccagctacttggaaggctgaggcagaagaatcacttgaacctgggaggcagaggttgcagtgagctgagatcacaccactgcactcccgcctgggcaagagagcgaaactccatctcaggaaaaaaaaaaaaaagatgtttgttgaattcaagatggggtgttattatcatccctagacccttcagaaggagcagcttttatggtgcactctgtagccctgatctaatccccggctgagcctctaagctctatgctttctgctggtaccacccatttccttgcatttagccggggttatctggagctggtctgcagccaagaatgtcatactttcctaatctccccagaggcctgagagacgcctaaggtcatgggaggtgcccccacaggatctcagtgggctgagcagaaatcgggactccttgacctaacccacccccaggccccttctacctcaccttccagcaggctcacgcctgtaatcccaacactttgggaggccatggtgggcgaatcacctgaggtcaggaggagttcgagactagcctggccaacatggtgaaaccccaactctaccaaaaataaaaacattagctgggtatggtcgtgggcacctgtaattccagctactcaggaggctgaggcaggagaattgcttgaacccaggagacagaggttgcagtgagccaagatcgcaccactgcactccagcctgggcgacagagcaggactccatctcaaaaaaaaaaaaaagttgaacacaaatttaccatacagcaatttcgctcctaagggtctacccacagaaaaggaaaatgaatgcatttgtacatgaatgttgatagtagtgttattcgtaatagccaaaaggtggaaacaattcaactatcaattggtaaacaaataaaatatggtatatctgtataatgcaacactattcagcaataaaaaaagaatcaactactgatatatgcttcaaaatggatgaagctcaaaaacataatgcaaagtgaaagatgcaagctgcaaaagactacatctgtgtgattctatttatatgaaatgttcagaaaaggcagctctatagggacagaaagcaggccagtggttgctgggggctgatggtgggaacaggaactgactgcaaacaagcccaagaaatcttttagggtaatggaaatgttctaaaacagaactgtgttgacaattgtataactctatacatttacttaaaacaaattttatttatttatttatttattcattcatttttgagacagagtctctctccttcccccaggctgaagtgcaatggtgcaatctcggctcactgcaacctccgcctcctgagttcaagcgattctcctgtctcagcctccccagtagctgggattacaggtgcctaccaccacacctggctaatttttgtatttttagtagagacagggtttcaccacgttggccaggctggtctcgaactcctcacctccaccctcctcagcctcccaaagtgctgggattacaggcgtgagctaccgtgcccggcctattcatttacttattattattatttttagtagagacaaggtcttgtctgggttggtctctagctcctgggctcaagcagtcctcctgcctcagcctcccaaagtgctgagattataggtgtaagccactgtgcccggccagaattgtatatgtatttatttatttatttatttttgagacggaatctctcccaggttggagtgcagtggcatgatctcagctcactgcaacctccacctccctggttcaacgattctcctgcctcagcctcccaagtatctgggattacaggcgcccaccaccacgccgagctaatttttgtatttttttttttttgagactgagttttgccgttgttgcccaggctagagt[140 bp omitted]tcgccatgttggtcaggctggtcttgaactcctgacctcaggcgatccgcctgccgtggcttcccaaagtgctgggatcacaggcgtgatagaattgtatactgaaaacaagtgagtcttgtagtctgtaaattataccctaataaagctgttaaaaacattttcctagctcgggttgagatctctgggttagatgtgtcctgggaacccagctgggacccaggctgggtggggtgtcctcctttctctcctttctaagtcagttttctgtgatctcagactttcaggaagctaccagctgtcgctcttgtttcttttttgaagaagtctggaattctgcagactcagctcatatgggagtaaacatcctggctcttggccactctgactgaagtgcaaaaatgagcatcacggccgggcacggtggctcacgcctgtaatctcagcactttagaaggccgaggcaggcggatcatgatgtctggacattgatactgtccttgccaacatgatgaaaccccatctctactaaacatacaaaaattagctgggcatggtggcatgtgcctgtaattccagctactcaggaggctgaggtaggagaatcgcttgaaccagggagttggaggttgtagtgagccgagatcgcgccactgaactccagcctggcgatagagcaagactgtcttaaaaaaaaaaagcgcatcacagggaatgggtgggagagtggaggggaccaccacaggtggcccacccctatcttgatatgaccaaacgccgcctgggatgctgagcactaacccagagcaaggactgaatttggactccagggtcctggtaggacctgcacctcccttgctccctggctgtgctcaggttgaccagctctccaaacacaccctccctttctatacctccaggccttggcacacgctgtgccctccccttttccttgcctacctggaaaatctatttttccaataagaatctgttcattgtcatctcctctgaagctttctcctttgtgtgcccaccacccccagcccctgccatccctccagagccctcatctccctgtggcagagggttcatgtatatgtctgcctcccacactgctctgtgggctccctaagacaaaccgtctgtccgtcttacttatcgcttattctcaagactctaggacaggccaagggaagaaatggagggaatagtacaccacatcagacgcttccaaggccaggaagaccaagggagacgcccccattcctctcatctattcttggcctaaatggcttctctcatctggtcccagaatggcccaagagccactccctgtgggaaccacagtttggggtggaagcctcctttccacagctttccgggggccagacccacttgccttggaaactccctttgcataatttaaactgcagtgtagggtccatggccagctcaagcccagcctaggcgggggcaacctggagtgggatccagctagagtctcccttccccagctgccaggacctcaggggatgaaagttccctctcagcagcttcttgctgcagtggcagagaacaagggggttaagctatgtggcaacctgagctggttgtttatgtttctgctttagtgtggaggcttggctttgtccggagttgaggcaggggtcctcagaggccctggcagctagtgaccagccaggagtggtgacataattttcagggctagggccggacatgatgggtcacgcctgtaatcccatcactttggggtgccaaggtgggtggatcacctgaggttgggagtgtgagaccagacttgccaacatggtgaaaccccatctctactaaaaatctaaaaattacctggacccagtggcacgtgcctgtagtcccagctactggggaggctgaggcaagagaattgcttgaacctgggagggggaggttgcagcgagccgagattgcaccactgcactccagcctgggtgacagagcaagacgctgtctcaaaaaacaatattcagggctcagggcaaaatgaaaacgtgggacttttgttccaaaattattaagatttttaagatggtgacagtagaacattaaaccaaacacagacttttcttttttattattatttttattttcatcttgtttttattttttgagacagggtctagagtgcagtggtgcaatcatggctcactacagcctcgaactcctggactcaagcaatcaccccctgcgtcagcctcccaagtagctaggactgcaggagcacctactatgcccagctaattattactattattattttatgtagagatggggttctatgttgcacatgctggtcttgaacttttggccacaagcaatcctcccactttggcatcccaaagtgctgggattacaggcatgagcctccacacccagtaagcatgggcctttctaaatctatgcagccggccctggtgccagggagaggagcccagcttattccaaccacctctctcagcccagacctattgtctacccaggcttcttagttcagaaaagtagctggagaaatggaaagccttaggatctttgctcaactgctcatccctatattgggaataaaagactccaggctactgacagagactcggccacagcaggcagcccacagggtgctgccttggtgttcccaccacagaaaccagagcctggaatagaaacggggatacctggccaggcacagtgcctcacgcctgtaatcccaccactttgggaggccgaggcaggcagattgcttgaggtcaggagttcgaggccagcctggtcaacacggtgaaacccccatctctactaaaaacacaaaaattagctgggcctggtgatgtgtgcctttagtcacagctactccggaggctgaggcaggagaatcgcttgaatcctggaggcagaggttacagtgagccaagatcacaccactgcattccagcctgtgcgacagagggagatcctgtctcaaaaaataaataaataaacgggctacctgaaaaagccacctagacttcaacccagagtggtctgttcatggtcatcaaatatttacagagggtcaggcacagtactgagcatggggttacaagggtgaataagccccaggccccacccttaagcagcgcacagcctagtggatgaggaaaattgacaaacattatgagcttagaccattgtggtagtacaagagagggaacctgtcctagccggggtagaaggaagttcagggaaggctgcctggtggaggcgacatctaggctaagactcgaaggctgaattaggtcaagaggggaagaagagtaagggcaaacagcatatgcagagactcaggagctggacacggtggctcatgcctgaaatcccaacactttgggaggctgaagcaggaatattccttgaggctaggagtttgagaccagcctgggcaacatagtgagatcttgtctctacaaaaaaaaaaaaaatttaatgagccaggtgtggtggtggtgtgctcctgcagtcccagctacttagggggctgaggtaagaggatcacttgagcctaggaggtcaaggctacagtgagcctggatacaaatggagactctggctcaaaaacgaacaaaacaaagaaagaaataaacaaaaacacaaaggatcagggtcatgaaagaacctggcacatttagggaaattatgaagtagttcatggtagctgggactggatcaagaagagatggtttgaaggtccagatcatgaataaaatgaatgtgtgtaaagtgcttgacgttgtgcatagtaaatattctgccatggtagctcattataattctggttttgtaggccaaattaagggtttgggattttgtcccgtagtcaatggggagacattcaagagctttaagcccagagtgacttgatgagatttgctatatggccagatccccgtggctccttggtggattatgaactagaagagaagcaaggctggaggatcagaaggccactttgaaaattaacaggtatggccaagcacagtggctcacacctgtaatcctagcactttaggaagctgaggtgggagaattgcttcagcccagaagttagagatagtcttggcaacatactgaccccatctctagttaaaaaaaaaaagagagagagagagagactgggcatggtggctcacacctataatcttagcactttgggaggcagaggcaggtggatcgcctgaggtcaggagttcaagatcatcctggccaacacggtgaaaccctgtctctactaaaaatacaaaaattagccaggcgtggtggcgtgtgcctgtaatcccagctacctgggaggctgaggcaggagaattgctggaacttgggaggcggaggctgcagtgagctgatattgtgccatggcactccagcccatgtgacagagccagactcaataaacaaataaataaagccaggcacggtggctgatgcctgtaatcccagcactttgggaggccgaggcgggcagatcacttgaggtcaggagttcgagaccagcctggccaacatgcagaa[134 bp omitted]ctactgcactccagcctgggcgacagagcgagactctgtctaaaaaaataaataaaaataaaaataatttttagaaaagaaattgagaggtatggcaggtgggaggcttcacttatatcccttaacaatagagtagataaacatacagtggaaaacaaaaaaacagcaatgaaaatgaactcaccacagctatatgaaacaacataaaggagttttgcaagtgtattcttgtgcaaaagaaggcagacacaaaataatactgtataattcaatttacataaagttcaaggaacagacaaaacgaaactacagtgtttagggacacattctcaggtggtacaactccaaaagcaaggaagcgattatcacaaaagtagttggaacaccaattaccctgcagaggtcttctgcttgactgttcagtaccatggcatgggtgatgctaacccaggctcactttttgataaatcattaggttttacatttatgttttgtgcacttttccatgtgtgctattctttttttttttttttttcttgagacggagtctcgctctgttgcccaggctggagtgcagtggtctgatctcggctcatcgaacctctgcctcccaggttcaagcgattctcctgcctcagccttctgagtagctgggactataggcatgcaccaccacacccagctaatttttttgtatttttagtagagacgatgtttcactatgttggccaggctggtctcaaactcctgaccttgtgatctacccgcctcggcctcccaaagtactgggattacgggcgtgagccaccatgcccagtctattttgtatacatttttttgagacagggtcttgctctgttgcccaggctggagtgcagtggcatgatcatagctctctgcagttttgaccgcctgggctcaagtgatcctcccacctcagccccctaagtagctgggactacaggtgtgtgcttccgcacctggctaatttttgtgttttttgtagagacgcaggtttcaccatgttgcccaggctggtcttaaactcctggactcaagcaatccacccacctccacctcccaaagtgctagaattacaggcatgagccactgcgcccagctatgtttaagacacggtctctgtcgcccaggctggagtgcagctaactgcagcttcgacgtccagggctcaagtgatcctcccacctcagactcccaagtggctggaattacaggcccatgccaccatgcccggctaattttatttaaaacatttttcagagacagggtcttgctacattgcccaggctggtctcttaactcctgacctcaaggtatcctcccactttggcctcccaaagtgttggtgattacaggcatgagctactgtgccagtctatcatacactattttttttttttttttgagacggagtcttgctctgtcaccaggctagagtgcagtggtgcgatcttggctcactgcagcttctgcctcccaggttcaagtggtgtccctgcctcagcctccggagtagctggaactacaggcgcgtgccaccgtgcccggctaattttttgtattttagtagagatggggtttcaccatgttggtcaggatggactcgatctcctgacctcatgatctgcccgcttaggcctcctgggataaagtgctgggattacaggtgtgagccaccacacccagccccatatgctattcttaacaataaaaaggttttaaaaatttgtctttgggaggctgaggtgggtggatcacctgaggtcaggagttcgagaccagcctggccaacgtggtgaaatcccgtctatactaaaaatacaaaaaaaaaaaaaaaaaaaaaaaaaaaaactagtcgggcatggtggcgggcacctgtaatctcagctactcgggaggctgaggcagaagaatcacttgaacctgggaggcagaggttgcagtgaaccgagatcgcgccactgcacgctagcctgggcgacagagcaagactccttttcaaaaaacaaaacaaaattgggctgtgtgtggtggctcatgcctgtaatcccagcactttggaaggctgaagcaggaggattgcttaaggcaaggagttcaaggttacaatgagctatgagtgcacatcagtctgggagatagactgagactctgcttctaaaaaaaaggggggtaggggtgggaaacgccagctcttaaggtagtcattagaatggtgagaagaggttgggttttgttttgtttgagacggagttttgctcctgtcacctaggctagagtgcaatggtgtgatttcggctcattgcaacctcttcctcccgggttcaagcgattctcctgcctcagcctcctgagtagctggaattacaggcgcttgccaccatgcccagctaatttttgtatttttagtacagatgggctttcaccctgttggccaggctggtctcaaactgctgacctcaggtgatccacccgctttggcctcccaaagtgctgggattacaggcgtgagccaccgcacccagctgagaagaggctggttttgacatgcggaaagtgagcaaacggagaagatgaggcatgtatcaggtgaaaagcagtgctgaacactgtgagatagagaaacctttaagatacttaactatccaggccggaggcggtggctcacgtctgtaatcccagcactttgggaagccgaggtgggcggatcacctgaggtgggaagttcgagaccagcctgaccaacagggagaaaccccgtctctactaaaaatacaaaattagccgggcgtggtggcgcatgcctgtaacaccagctactcaggaggctgaggcaggagaatcgcctgaaccctagaggcggaggttgcagtgagccgatattgcaccactgcactccagcctgggcaacaagagcgaaactccgtctcaaaaaaaaaaaaaaaaaaaaagattgaactatccagggccactgtgtccactcagaccagtcacatcgcctgaatctagatcccttcttcacaaaacagggaggccagagtggtttaatggaaccagccctgcattttggtgttgagaactccgggcttaaaatcccagttttgttacttgttgatggctgtgtgaacctggacaatgacttcgcccctgcccctcgctccaacctgtttgctcatgtgcagatttaggtaataattcacagaattccatgataaaacagaagactaggcacttgggatgtttggtatcttggttatcaattaagagaatctgaacaatgaatgagaaaatactttgaaaacataaaagaatagataaaaggccgggcgcggtggctcacgcctgtaatcccagcactttggggggccgaggcgggcggatcatgaggtcaggagtttgagaccagcctggccaacatcgtgaaacaccgt[137 bp omitted]aatccagcccgggcgacagtgcgagatttcgtctcaaaaaaaaaaaagggtaataatcactacatggtttttaaactttagtgaaagcgcgggctagctggggggcatgagcatggaaaactggttatcccgtaggtcaagagcgaccacgtagtttactgcccaaagcagtacttttttttgagacaggagtctcactctgtcgcccaggctggagtgcagtggcgcgatctcgactcactgcaacctctgcctcccgggatcatgtgattctcctgcctcagcctcccgagtagctgggattacaggcgcgcgccaccaggcctggctcatgtttgtaattttagtagagacggggtttcgccgtgttggccaggctggtcttgaattcctgacctcaggtggtccacctgcgtcggcctcccaaagtgctgggattaccggggtgagccaccacgcccggcccaaagcagggcacttctgaaaaaggaggcaatattagtaattatgccagggcagcaggcataaatcaaagctggccccccacccttccagaactgagacaggacccaggagtctggtttcccatcaggcctcttatctgaacgagaagctctgcgagggcagaactgctgtgcctatatagagctggcttatttctggagggctcaaatctacttggagcaatgctcatgccactgtgagatgatcacggctaaccgattcagcacttaggaagcgccaggtattgcgctgaggacttcacatgcatcacctgagttaattctcaccaaacctttatgaggtaggcggatttattatcttccactgaggaaactaaaatttaaattggttaactccttcaaggccacacattttgggtggaggagcagggattgaaatcagatgaggatcatgaaccctcgttctcaattactactcatatcggtgcctccgtttttcttgagcgtccgcctgcctgcccccacgctggcgtgcagccaggaccatggacatctgagaggctactcagccggggtacctacagcccctggctccacacaagcgccggtctgacagcaggtggcaagcttttcctcttctcaagctagcactggaagggatgcttgctggggagaccggagatgggtggagctaccactcggacgcctgcaggctcctaccaaaaagaatcctgcagggagccggatgaggagcacctcacagctgccagttccctgccaggctacccgctgtagctggtttgagggctcagtgaggctttgaactgcaactaatggccacagatgtcaatgttggaaaggccctacaatgcatttagttgatttcccaactctgccgaaagccatctctattacttgcccccgaaggctagtttaagttgcttctactcaagagcatttacagcttgggttcgatgtatatgtagcccgggcatggggcagggcttcttaacatttggacaccacgcagcacaaaggcccagagagggaaagagactggctggaagaggcagagccgcgcgggtgccaggacccaggtccttgctacgtccggagcctacgtcaccacgatgcctcccctgggccggcggcagaacccgagacccccgcaggttctaagacagcccccacgccccccagtgcgcacgctcagtccaaccccgccgcgcaccgcccaccgcgaacatccggctcctgcgtgtgtgctcgagggggaaactgaggcggggacgtgccagtgaattcattccttcctcagtccacccgcaggcctacaaagctgtctccccttcctcagcgccacaaggaacagcagggacggatgggaagaaggggagggggccgaaagcaagctgggtgcgaggagccagccgaccctgccacactcaagatggcggcgcggccgcggcgaggtccctcagaggcggtaccagcgcatgcgcagcgcggagtcccggcccgggacacaagatggcggcagcggcgctggggagggcgaggcggaggcggcaaaacgggcggtcgagcagaacgtgtagccgcgtcccctccagtccgctccgggcaggtaagagtcccaggaagccatggtcccgcagcgagccgcgccagggtctggggatccgaagctggggggcggcggcccctccggcgctttctgctcgggactgccgcttgccctgtctctgttgccgccgccatcttagacccgcgggtgggcggccgcgccggtggccgaagtgagggaggtgggcccggagagccccagcggagcgggctctagggcccctccgctgctgccgccgccaccgcctttgtgtcgggctccgactctgagtcgcctcagcccgggggcgggagcgcgcggcggggcggggggcggagcccgagagatgggccggcgcgcgcgcgcgcgccaaacagcccaccctcgctggggtagggggaggggaaggtgcgcgcgcgcgcgcgcgctggagctcgcctctcgccttcgtgcgccgtcgcgcctgcgtactttgttcgccctttgactcctccctactgggccggagaattctgattggtacattgcggagatggtcccgccccacgtgcctccaatcccggactcggactctggcttctggtgggtttttctggttgcgcagatagagttgtttatccttgagcagcggtaattctcaaactgcggtatgcgtgggggtcgggaagccacaggataaataaagacgttaacttaagagcagttatgtcttactgggagcgtacaatgctggactctacatataacggtcgagtgattccggtttataagccggaaagcagaagggcccggaatccgggtctgtccaacccaggggctggtacttcggccacagacctgctgcgctcaagtcacataggaaattaaaaatggttttaattgcaaaaaatgggtacattttttcaaatagtgtgaaaaaatgagtcatcctgtctcccagtcactcttacggtgcgttttaaaaatacaaattcttgtgtgcctcacctccgtatttatttctggcttctgagatgcgcagtgaggcacaggagtctgattttttttttttttttacaaactccaagatgattctgatgcacagctggctttggaaatactgcagtgtccccatttagcctcacactaagctgtgccgcttgtgcgtattctgcaaagttcatctacccggtgcatcaatatcacaggatgtttcttggggaaaatatttttcaataaaggcgaacaagatgtgtcacataatgtgtttgcatgtttttgtttttgcaagacattattcagagcgtgtctttgacttgctgtgggaggcttgggattgtgcccccacagatcagtgataggtatgtttgttgatttttctctggtctaagggtactttattttattttttatttttatttatttattttgagacggagtcttgctctgtcgcctgggctggagtgcagtggcgcgatctcagctcactgcaacctccgccccctgggttcatgccattcttctgcctcagcctcccgagtagctgggactacaggctcccgccaccacgccgggctaatttttttttttttttttttttgtatttttagtagagacggggtttcactgtgttagctaggatggtcccgatctcctgacctcgtgatccgcccatctgggcctcccaaagtgctgggattacaggcgtgagccaccgcgcccggcctcttttattttttaagagatgaggtcttgccctgtcacccaggctggagcacagtggcatgatcatacttcactgcagcctcgaactcctgggctcaagtgacccttccacctcagcctcctgagtagctgggactgcaggtgcaatttttttttatttgggcccggcgcagtggctcacacctgtaatcccagcactttaggaggcccaggtgggtggatctcttgaggtcagaagttcgagaccagcctggccaacatggtgaaatcccgtctctactaaaagtacagaaaattagccagctgtgactcatgcctgtaatcccagctactgagaggctgacacaggagaatcgcttgaacccaggagttggaggttgcagtgagtcgagatcgtgcaatgcactccagcctgggtgatggagtctcactccgtctcaaaggaaaccaaaaccaaccaaacaaaaagctttatttgttgtagagctgggggctcactatgttgccgaggctggttttgaactcctagcccagctcccaagttgccaaagccacgtgcccagcctaagggtacttcagttggcaggactggctacagagtttgtggggcccagtgtgcaaaatgtaaatgtgagctccttgttaaaaagttattaaaaattttaagacagtgacggcagagccttacaccaagctcagggctttcctgaatgtggatccctgtgcagccgtgcaggtcacatgcccatgaaagcaaacctattggtgagaaagcttaagaggtatcattttcatcccctgtattccctcatcccctctcccggtgtgtcctgccctggaggcccccaacttgctctttgtttttgtccctcttgtccctgccctgcagcatcccacaggtctgtgactgttttcctatttgctttccagctgctgatgcaaggaatcccctgggctcccgtccactccactgctgaccagcccattcgcctgtgctgagtcttcctgcaggcctttccttgcctctgtgggaccctgtgggggtccatccggctggagaagaaaagcctctcatgctaacgttgcagaccccagagggtgagagaaagggggacttcattcagtcttgaaacctgtgtgctcagcccccaaggcatcaggaattcttcctgcccagagaatcaaggcagcttcatttttttcgtaccttggtcagtggttctcaacctttttgttatcaaggcactttttgttgtacatatgtcctgttgccccctgcatttttatctgccaaactgtactgatggagtaaccattgacttttcccttcctaaattaaggaagacgtctatgatggagtgtacaataaaatcagtgtcccaatgattcgtatgatgtcatcaacaaccaatcagagcttctgatcagcatgagataatcagtgtgaccacaatgagttgataaaatttcagcatgaaaagataactgatgtttaagcctgcctttgtggtcttgttgtgggcaaaagtttgatttcttttgggtggtgtgacctactgaaaacaactttagcatcaccagttctatctcagttagctcccagttgtctgacagccccaggccagaagcactttggctcctgaggctgttgctgggtgtgctttgggtgggggagtagggaatacagatctgaaggaactggcctccttgctggtacttacagtaaatattcacctggggattatgaaggagtcaattagatagtccttcttggttgcattggttattttagcaatagctgcttcctgccatgtagtgtaaaataaggtgaccaattagattccatgcccttccctagtgtgctttgttccttttagattttactggatgagagcagtaaaatcccatctccttctgggagttgttactattccttcttgtaggaatcgcttctcaagggcagaccctgttctgtcttttttgctgctcttggtgctttgtaaatatttgcagaatcagtagtgctcctgttgggtccaggtcctaggcctgagcacaggagagagctgaattggacgcagttcctatttctggaagttctgacagtttagtggggagacaaacccagctgatagatgagaccatctgagtgctacgacagaggtgttcacggccctgaggaggagctctgaccacctggcctggggaggggagagtcaaggaaggcttcctggaggatgtgaacccagtagcaagccaggcagagaagagggggaggggcatttcaggcagaggaagcagcaggagtgcacccattgaacagctggaattgcagcttagatcccagggctgctgtgtggcaccatgctggccctccaggataggacctgattggatttctccacatcggtgggtggtcactggggccctgggtggattgtaattggcgggtgagggggtggagctgacactctttggtcctctgtgtggcaggtcctgtgtgggtgtggagatggccaatgagaatcacggcagcccccgggaggaagcgtccctgctgagtcactccccaggtacctccaatcagagccagccctgttctccaaagccaatccgcctggttcaggacctcccaggtactgagggggagcagtagtggggtggtggggtaggaagggcaccctgggagcagtcctgaccctggctgggctccgtgcctgtttgcagaggagctggtgcatgcaggctgggagaagtgctggagccggagggagaatcgtccctactacttcaaccgattcaccaaccagtccctgtgggagatgcccgtgctggggcagcacgatgtgattgtgagtgccagcctagggtgggggggtctcagagtggcctctggcacctgggccttccccaaatgtaccctgagcagccgttcagtgcccagccctgtgctggcacctgcagatacaatgacaagcaagacagacacagcccctgccctcatggaacctacactcaaatggggtagactgacaagtaaacagatgattgcatggctgctgcacggtgggtgctgtgccgcgaggcaggaatgaacaaggcagacttgctccctacggtcgcagagcacccatgggctgccaggtgacagcaggattacacttgtggtccgtgtatgaggaatagtgttagaatacatctagatcctgacatactctggggaaggcaaggagatgggaaaagctctgagaatgagtgtttaaggtgagagagtgagtgagtgtggggaggaaaagaacattctaggatctgacatgtcagtacgacgggaagtacaggcatgggctgtctggtgggaacatgggcttttgggtccttctcagctggggcagcatttctttactgggcacagttgagacagttggcatcttcattttgcatgtgaagacactgaggttcaaagatggggaacgactggcacgagacctcacagtaataggcagagcaggacgcacacctgatgtgagttcagggccacactactcaccaccatgcattctctcagtgttaccaagagtcccatctgcagggccttgctttttacaacaataagcagtttttgagcttttcatttattcctcacattcattctgttcttgaggaaaataatgtgtaatgagtactgatctcatgccagatgccatgttaagcaggtcatattcactgactcatttaataatctcagtggtgatgtagggattagcatggccattctgaaggtgagagaactggaagggaagtaacacaccctgtcgcacagttgcaagttgcaggcaggactggagcccagtgttctctgcctgtatcccagctcctctgctcttccctaaggagtaggagcaggggtgggagggcgtgaggattcaaagtcctgtggctcctaagccgctggccctggttgcaactctgctggtctccctccaccagtcggaccctttggggctgaatgcgaccccactgccccaagactcaagcttggtggaaactcccccggctgagaacaagcccagaaagcggcagctctcggaagagcagccaagcggcaatggtgtgaagaagcccaaggtgagtgtctgtggccaggagccggctgccgagcggccggctcagacgggccgcctgcaggctccctgcaggggctgggcattggcaggccagccaggaggggggcctgggacacagttcaccaggtgtgcactgtattggatggagcctctctggtgaatctcctgacttgacacctttgtgactttcactacagattgaaatcccagtgacacccacaggccagtcggtgcccagctcccccagtatcccaggaaccccaacgctgaagatgtggggtacgtcccctgaagataaacagcaggcagctctcctacgacccactgagtgagtccctgctgattggcttgggggcacccattgctaatgtcagcctgtctgggactgtggggtggtgtgggtgggcaggacatcctcatcactcctctctgtgccccaagggtctactgggacctggacatccagaccaatgctgtcatcaagcaccgggggccttcagaggtgctgcccccgcatcccgaagtggaactgctccgctctcagctcatcctgaagcttcggcagcactatcgggagctgtgccagcagcgagagggtacctgcctctgggctgcagcctcctttatttccacccacctttagcatgagccaggtttggccaggccagtttggggatggcggagtggggcccagtggtgagccatgatcacaccagtgcactccagcctgagtgacagagcaagaccctctttcaaaaaaacaagagtatctataccttaggattctatgataaccattaagtaaaatgaataagtattaaatgaactgtagtttttaattttatttatttattttttttgagatggagtcttgttctgtagcccctgctggagtgcagtggcaccatctccgctcactgcatcatcctcctcctgggtcccggttcaggcaattctcctgcctcagcctcccgagtagcgggattacaggtgtacaccaccatgcccagctcatttttgtatttttaatagagatgggggtgtcacgatgttggccaggctggtcctgaactcctgaccttgtgatgcgcccgcctcagcctcccacagtgctgggattacaggcatgagccaccacacctggctaatttttttttaagagacaggatctggctatgttgcccaggctggtcttgtactcctgggctcaagccttctgcttgccttggcctcccacagtgctgggattacagatgtgagccaccatgcctggcctagtttttaatttttatgattagtaataaacctatttaaccttgctcaaatatagaatcctctggcctttcacctttttttttttttttttaatttttttttttcttgagacggcgtctcgctctgtcgcccaggctggagtgcaatggcgtgatctcggctcactgcaacctccacctcccgggttcaagcgattcttctgcctcagcctcctgagtagctgggactacaggtgcctgccaccacgcccagctaatttttatacttttaatagagatggggtttcaccatgttggccaggatggtctcgatctcttgaccttgtgatccacccgccttggcctcccaaagtgctgggattacaggcgtgagctaccgcacccggcccaccctttttttttttttttttacattatgtaatacttttttttttttttctttttctaagatggagttttgttcttgttgccctggctggagtgcaatggcacggtctcggctcactgcaacctctgcctcccaggttcaagcgattctcctgcctcagcctccttagtagctgggaatatgggcacatgccaccacacccagctaatttttgtatttttagtagagatgggttttttccatgttggcaaggctggtctctaactcctgacctcaggtgatccacccatctcggcctcctgaagtgctgggattacaggcgtgagccactgcgcccagcctttttattcttttcttttgaaacaaggtctcgctctgtcacccaggttggggtgcagtggcacgaccacagctcacagcagcttcagccacccgggttcaagcgatcctcccgcctcagcctcccgaggagctgggacacccagctaatttctttttttttttttttttttttttttttgtagagacaggctgttactgtgttgcccaggccggtcttgaactcatgggctcaagctgtccttccaccttagccttccaaagtgctgagattacagatgtgagccactacgcctggctagatacttatcaacactataaaactagtgattcttagaatatattttgggaaatgcagcctagaagcttctgaagtgggactgtgtcttgcttactgctgaatgcgatgcttcctatacgtgccaagctccaagtgggactgcttgattaaatccaggccttcagcagctctcctgtcctgcaggcattgagcctccacgggagtctttcaaccgctggatgctggagcgcaaggtggtagacaaaggatctgaccccctgttgcccagcaactgtgaaccagtcgtgtcaccttccatgtttcgtgaaatcatgaacgacattcctatcaggtacagctccacagctggggatgaccctgggccatttggtttctgtgcccagtcatgtatagaaggcctctaactctgcccactctgaaacgcaggttatcccgaatcaagttccgggaggaagccaagcgcctgctctttaaatatgcggaggccgccaggcggctcatcgagtccaggtttgcctgtcttctgccccaggcgagatgggtctgtgattaaagtggcaggtcataggccatcttgcccagtctcatgcagggctgtcattgctctcggtggcagaagtggggccagctcccaaaggcagaacaagggctgtgatggaagctaggggttgatacccagcgagcccatggaattgggatgaggagggtggagccaagccattcctttcttctgccctccccttgactggcaggagtgcatcccctgacagtaggaaggtggtcaaatggaatgtggaagacacctttagctggcttcggaaggaccactcagcctccaaggaggactacatggtgagtgggtccccgggtgagaaggccagttttagggctctgtggccacttcctccaggaagcctactctgcctgtccaggctgggcaaggcctcccccagcggcctattcttgtgcagtatggcagacgttcgacattcgtcagtccccaaactcatgactgtggagatgtttctctgggctcctggctttctcccacagaacatttccattaacaatcttaatggagtcttatgcttggccacacaccacagatagctgcctttcagcctaatgaatgttcagcatctcccttgtagatttttggaaacagattgacagcctgctttttttgggtgtgtgtgttcatatcatggttaagagctaccatcagattcaattccctactcttaatgtgtccaaaacagttctgttttctggccaaaacctatcacttcttaaacctctccaccagcactagcaatgggctttcttttcaggaccatatttcacaagagacaaggtttcgcacttcacgatagtaactgtgtacttgacacgtagagagtgacaaaggtaggtgtactcactagccagagtgactcattctcactcttcagttttacacgtgtgattcagcaaaattacaaatcccgacagtcatctttgcaagtagctaaaagctcaaatctcaagtctgcagcaaccaagcaccctgttttgtaattgtgtctttccccaatagactgcaaacaccataagctgggactgtgctggtttgtctgtttctccggtaattatcatgggatctagcagtgtaaccccaacaaaagctactggcatttattgtacacttactgtatgccaggcatttggcaagcccttaagggaaatgatcacatttaatattcaaactgccctgttaggtatctcgtgtccccttgacacttgaggaataagattgagagaagccaggggatttgtccaagtgacacagctagtcagcagcagagctggtttcaaaacaaggactgctggactccaacagccctgcggttacctgccagcccagctgagcccctctggcctccactagcgccctgatccagaatgtgtcctctaggatcgcctggagcatctgcggaggcagtgtggcccccacgtctcggccgcagccaaggactccgtggaaggcatctgcagtaagatctaccacatctccctggagtacgtcaaacggatccgagagaagcaccttgccatcctcaaggaaaacaacatctcaggtaggggaaaggtgaaggaggagccagctgtgatgccgtcagctctataccctgatggaagggacaagtgagactgagcctcaaggccagggactggtttggggcagaacctgcctgtgtcctttggctgtacttctctgggaaacggagaagtgataaagggagagccagatggtggtggtgaagataagctgggagtcgtagttaggtgtacctgaatttacatccattctctgcaagccttactttccccagactgaagtgtagcacctggtggtaggattgtgtgagtactcataggtaactcaagtaaaccatgtggccccaaaagatccccaaataaaggatcgtcgctattacgatgacggcgatgcagttctcgttcttctgcctggcagcacaacccacgggcctgagccttcttgcctgacagcccaaggcacggcatacggggccctgcttcggtactgagtgtgttgacacaggccaccagtttctgccccggccagttgcctggctggtttctttttatggcttttcattccctttctactgaactgggccagagtatactgatctgtggaatgggacttccctctctcggtacaaagcatgtggcccacagtggctgcagcgtgagaatgaggagtgtggtccctcactgctctccctgcccacagaggaggtggaggcccctgaggtggagccccgcctagtgtactgctacccagtccggctggctgtgtctgcaccgcccatgcccagcgtggagatgcacatggagaacaacgtggtctgcatccggtataagggagagatggtcaaggtcagccgcaactacttcagcaagctggtaagagctgcggggaggaaggccctagctgatggcatgagtcagggcctaggatctttcctgagcagagtccccagcaggaggccagtgatgaggacatgagggagcactgctgaaggctcctcctctctgtcccgctccacagtggctcctttaccgctacagctgcattgatgactctgcctttgagaggttcctgccccgggtctggtgtcttctccgacggtaccaggtacaggcctggggcagcagggagggctccccaggagggaacagggagggtgagccccaggtgctgacggtggccactccgcagatgatgttcggcgtgggcctctacgaggggactggcctgcagggatcgctgcctgtgcatgtctttgaggccctccaccgactctttggcgtcagcttcgagtgcttcgcctcacccctcaactgctacttccgccagtactgttctgccttccccgacacagacggctactttggctcccgcgggtgagggccaagggctgcccctctacccaggccagggaagaggtcctccagagcacagggcccgcctctgctggctgtagtgtcaggcaggcttgggtggagtccctgcctccacctcttaccggctatgtgaccttggacatgttgcttaacttctgggagcctgagcttttctggttctgtgggcaggcacgtgacacccctaagctggcctgtgggtttctcagtgagtcagttcagggtggaataggaacacgtggtcccaggccctgagaggagtgagaagtggggccacagacctcagaggccttacaaactaggggttgaggtgaccacagatgagagaaggtaatgctgtctccagaaggaagaatggtcaggacctccagaggtccagagctcagcagctggggatcctgggtgtagcttctgctgtggtggtggtgggctcagaactggatttgaattccagcttggtgaacatgggcatcccagcctgagcctcactcactgtcctcattcattcagtggagacggtcatgccttgtgccccaatgaattagggtgaatgctggcttctggacaggccatctcttcagtgtggctgcctagggttggggggtggcacctgtttctggttgagggactgggtcctgatgggacttagaatgctcactcctgtccccaggccctgcctagactttgctccactgagtggttcatttgaggccaaccctcccttctgcgaggagctcatggatgccatggtctctcactttgaggtgggtgcactgccagggtgagaggtgggcaacaggcaggattgccagccacctgggaggtagtccctgacatccaccctgtgtccccttccacagagactgcttgagagctcaccggagcccctgtccttcatcgtgttcatccctgagtggcgggaacccccaacaccagcgctcacccgcatggagcagagccgcttcaaacgccaccagttgatcctgcctgcctttgagcatgagtaccgcagtggctcccagcacatctgcaagaagtgggtgccagggagggcaggggaaggaggctgggctggccaggccaggcccagccccaccctgagccattgcctttgcccgcagggaggaaatgcactacaaggccgtccacaacacggctgtgctcttcctacagaacgaccctggctttgccaagtgggcgccgacgcctgaacggctgcaggagctgagtgctgcctaccggcagtcaggccgcagccacagctctggttcttcctcatcgtcctcctcggaggccaaggaccgggactcgggccgtgagcagggtcctagccgcgagcctcaccccacttaacatatcctgcggggaggaggagccccaggggtgctagtctggactgctgggactcgggcccctggggcctcagagggaccccggctgccactgacatatgaagattatggttctgccagggctcccctccctgcctgtccccaagtcctcacctcaaactccctccaagtcccatgtatataggtcctgatgccttcccaaccccgcccctcaccctgttgccaccttgtttcatttgtaaaaggaaatacagaaacccccccaagaatgtgtgagggtcttgagggcagagaaggctgaggcagctggagctacttctgggaccacactcccctccctccctccagcagctccttctcatggcccctgggccttcactctcccatctggggtcccacacagctgggtccctggtggcctctgcctgggctcaggaggtccgaagagtccaaggccctgcatcccctatctccaaactcccccagcagggcctgtatggatacccctggggatcagaggactgggagctgtgcctgtccccaacccaaaagccagactcttgctggccctggatccccacagtgagcgaagagctgggtgtgcctcacagtcaaggctcaggagagcagcttcagaggatctgtaggcacagagcgtgtgctccctagggcccagggaggaagcaggtctgaaggtgcttgctggggctctcgctggttcagccgtctctgaaccagccacctctctcattgccaggcctctgcagcaagggtctgccctgctggtggatcaccggacttaacaggggcagggcaggacagggcacgctgtggagccaggcagcctccacctcacaagacctggcctggtacaggctacagcagcaagcagacaaagtaagctgttcaggactggactccggtccctttattgagactgacaggccagtgggtccacccaaacaaaaataaatttctctcccaaagcctgcctgcaggctggggcacccagcatgtcctggctggggcccatggctgcccctaaccccaacagcacaggtctggctccctgggaatgagaggatgctggctatccagtatctggagatcctaaatgaagagggaggtgagtcctggtggccccctacccccaggagagctggccgcaaatccatgatctgtgttgggccctcggggctcagtcatcggccagggtgatgacgtcgtactcgatgccctggtgctgcagctgttgaatgtgttcgggcactgtctcgtctgtaccaaacaggccctgggcttgggccatggcagcatcagccactgctgccaggggaggggaaagtatggtgagctggaggctcaagagctgggtccatacccagccccatgctcctcaggatccagctccatacctgtgacagctgagtgtgctgcagcctcaagttgagcctgtgtgacaagctgctggcctggggacacaggcacatactggatctggaggggagaagctgataagatgctggcctggagaaacctgcctgtgccccaggtctccctgtccccccacggccctacctgggactcctgaaggaacggggctccttgttcatactggatgtgtgtgatctggccctcctgtacctgcagagaggaagccaagctgtgatcctagggagaggtcatgcagcccttcaccacacagcaccctcatcccaggtctggcctacctggatgtgatggccttcagggaccacaacatattcctgggggagcaggtgctggacaccatcctgggagatgatatactgcacctgttggtggggggggcgggcatggcgaggcaggtgctgaggccccactcgccaggagcttagctaagaaggcagagtggaagactaggaacagccaccagcaacaatgcagttgttggcaagcatggaccccaggaggggtggtttggaaagtatcattcctccccaaggtaggtctttgggagggtaggaggtcacagctgaggggattaacagtagctagtagctcacctggttgtcggaggtcaccaggtgctgtacggtctggccatctgccgtggtgatctcttggatgtaggcggcttcctcctgccaggaccaagacagctctagcctcatttctctaccccaacccctgcctgtcgctggccagagggcccccagtcctgactcttacctgattggtcactgtctgttcctgggcaacgatgatgtgttcctggctcagtgcctgctgtagccgctctgggcccaggaccccgtgactggactggagtgcagctgggcagagaggagaggatgctcacctggggtccaggaaaacctgcaatgccccagctgctactgtacccagtggtgccttttggggcagtggcccaagtctctggatctaccctgttgcccaccctgtggccccaggggcagctcactgtgcagggtggccagtgtttcgtcatcactgttcaggatgatggtctgggttggggtctgggtaggggcccgggctgtaggggttcctgacttcctcccatcaggactgtgcagccgctggatgtggaacttgaggtgcccgttacggttgaaactgagggggatgaaaggtggctcaggttagctccaccatacatgcccagcagtccccacccaccagtatctggcctcaccgctgcccgcagaggtggcatgcaaaaggcttctcctttgtgtgagtcagcatgtgccgacgcaggtccttcttgttcttggaggcaaagctgcactggctacactggtggggccgtaggcttgagtgctgtgccatgtgcgcctgcagagagggcagagttgggggcattggctgggtcaggacagatggcaacaaatccccggatccctgctgacagctggtcagggaaccagacaaagtggacctgggaaaaccaaaatcctgtgcactaacaagaagctgggtagaaaggccaagccggatccgtatctggtgctgctgtgtcctaagaatgaaaggccatagattccatcattattaggtaaattggaaaatctcactttacccatatgtaacacaggtgttagatgaggggacctgtgcaggtcccatcgggccctgaattttttttttttgagacagttttgctcttgttgcccagaggctggagtgcaatggcgtgatctcggctcactgcaacctccacctcctgggttcaagcgattctcccgcctcagcctcccaagttgcagggattactggcatgcgccaccacacctggctaattttgtatttttagtagagatgggttttctccatgttggtcaggctggtctcaaactcccgacctcaggtgatccgcctgcctcggcctcccaaagtgctgggataagaggtgtgagccaccgtgcccggccctggccctgattttctagggctgaggcctgatagggcgttcacctctgcactgtagggtggggctctaggccctgcttccctctccaacctctggagaggatgcagtgcatgactggatctgaaaacaaaatcctcaggcaaacagggaggccccaagctgggctgtgaacctgccccagaactggcccactcaccttctccatggtggctccccaaccacctcgaacctctgtgccctcagtattctagaccagtggtccccaccctttttggcaccagggactggttttatgggagataactgtttcacggcatgtgcagggtgatagttttgggatgaagttgttgcacctcagttcatcagatattagttagattcttagaaggagtgtgtgacctagattactcgtatgcacagttcacaatggggctgtgctcctgagactaatgcagctgctgtgacaggaagtggagctcaggcagtagtgcttgcccacctgccgctcacctgctgtgtggcctggttcctaacaggccatggatgactaccagtctatggcccaggggttgggcacccctgttctagacgttcgagtctccctagccatgcctctgtcacacacttctgtgcctttgctcctagaggcccagcttggccatcccttctgtggcattttccccagcacacacaagttcaaatgacctgctctgtgtcctgcacccttggttcacactcgggacactgtgtctggcattagtcacgttgtgtgtggtttgcctccccaccagaccaactccctgagagctgggaccttgcggagtcatctctgacccatctcatccactcagaggagagcagaggatctggcttgaaagggcactcattaaaggtttgttatacaaacgagtagcccaatgaatgacagcagagacacaggagcaaccagcacctacccggacctcgggccactggcgggcactgaaggggcagtcggggcacttgaaggcaccaggcccagcgtgggcccgcttgtgactctccatctcagctcggccagggaaggcctcggcacagatcttgcaggaaaacttctttgatgcagcagtggctgcagatggcggtgacgggggcactgccaggcccagggctttgctggttgcaggaggtgaggaggcagagctctgggagtcccctacgcagtgggtcttggctggagatgggggctcagggccgtctctgggcagtcccccacactgcagcaggggccatttggcaccagaggccagagcatctggacttgggaaggagatggagccatctgcggtgagctgtagagagacagggagcatgaggtactgagaaggggagggaggtgggggagtggttggcatccccaagcctcacctcaatgtggtgcaactgggtaccatcagtagccatgatgtagtgggtgccagcttcttttagggtgtcactcacaaccacagcctgggctgcctctcctgcgggctcctcgctgtgggcatggagaaggttctaggagaagatggagggccacaggagcccccttccccaagcaacaggcatcaactgaggagtgactgtcaccacagatggactcaagtcagaagggcccagggttcaactgtggctctgccctgttaccaaatgaccctctaccatgtctcttgtaaatgattacaactcaagcatgggtccttctcaaaagctggtaattcttgtcctcggcaaacatggcgaggtggggggcacacagtgaggcagaggggtctaacccaaccagtagcaaacggtgaatccaccaccaggagctagtggaggaggcagggctaacgaggacctgctgcctaagagcagacagcaaatgctgagactggccgcccaggtgctggccaagggcatgggcctggggatcctgactccctgctcagctcaacaatttggcacttggattcagggcttcctcagatggcctaagagtttggtgaacataaacatgcctgcccaagctcattcactgtagggaagccaagtacaggtgccaggcctcaatgctggtaaagaggcctgagcttgctcggagtgtcagaactgaagaacacctgggatcacccaagaagagcacttgggcatgggaaccaaagggaccagggttcaaatctcacctactgcatgtgtggtttcaggctggtcacttaacctccctggcccatttcctcatttgtaaaacaagggaaatctgggtctcatgggaatggcttaggtcccatcatgagtgccaagtgcttggaatatctaagtggctaaaaaatggtagctcttgacctcctgagaagggtagactccaccactaatcacttgatgtgtattgggatttttgcctcctgccaactaggcttgggtggggcccaaatcggaccgaccgaccacacctacaaaaagctgaaaggggccttgcaggcagcaggtctcacctgtaaggtgtgccaggagctgatgttccctcctccatagggggtgctgtgatgacactgtagccagtcccaccaaatggaccaggtgccagggtgatctgcggtaggtcaggagggcctagctggctctcggctgctgcaccgccccctggctctgccacgtggagggtgaccacctgtggagtggcaccttcaggggagggctgcccaccaggggatgctaaccctgcttccacatcttccgacttcaccacagccacctgcaacggcaccagggggcgggatgggaggcactggtggcagaggagcgggtatgcaagacgcctcccccatctcagtgtcccagatgcacccacacactctagtcagaccagtgctgccaccactcatttgaatagcccaagttctttctaaaatatactctggctttccaaatcccactcagcaactggaaatagaccaacaggaatagggcagagcagttgtgccccccacaaagatttggcaacgtctggagacatttcttatcacagcaggagggggatggtactggcatatagtcgggagaggccagggatgccgctgaacaccccataatgcacaggaccgccccaccacacaatagtatctgcctcaacatgctaacagcgctgcagacaagaaatactggggacaactgacaaatcacttagaaaaaagctccagtgtacatcttattccagttggcttcaaatggtttaaagattaaaatgtaataaaactctaaatatattaaaataaaacgtaggtaagtattttagaattgggacagggagatttttctaatcatgacagagaaagataaaacctagagcaaaattaaccataaaatgaagccaaaaaacaaagaaattggggttgggggatatttcacaactcataaaaagtggacttccctcatatatggagctcctgcaaagcaataactaaaagctaacaatagaaaaacaaatacaggacacaaacaggtactttagaaaggaataaaatggtctctgaacatacagagaggagttcaacctcatttacggtcatacaattactttttttttttttttttttttttgagactgggtattgctcaggctggagtgcagtggtacgattacagctcactgcagcctcaacctcctgggctcaagcgatcctcccacctcagcctctcaagtagctggtactacaggcatgcattgccacacccggctaattttttaagagacagggtttcaccatgttgtccaggctggtctcaaactcctggactcaagcaattctcctgccttggcctcccaaagtgctgggattacaagtgtgagattggtaaagatttataacgactgaggccgggcgtggtggctcacgcctgtaattccagcactctggaaggccgaggcgggcagatcatgaggtcaggaaatcgagaccatcctgcttaacatggtgaaaccccatctctactaaaaataaaaaaataaaagaagccagtcgtggtggtgggtgtctgtagtcccagctacttgggaggctgaggcagaatggtgtgaacccgggaggcggaggttgcagtgagccgagatcgcaccactgcactccagcttgggcaacagagcaagactctgtctcaaaaaaaaaaaaaaaaaaaagatttataaagactgataatacccagtgtattggcatgaatgcagggaaatataccctactggtggccacgtatactggcgtatctttttacaaggcttctcaccataccctctgacccactaattcttcttgtaggaggctttttaaaaacactacaaagatgttggctgggtacggtggctcacacctgtaatcctggcactttgggaggccaaggcaggcagatcacttgaggtcaggagttcgaaactagcctggccaatatggtgaaaccctatccctactaaaaatacaaaaaagtagccaggtgtggtgacgtgcacctgtaatcccagcaactcaggaggccgaggtaggacaatcatttgaacccaggaggcggaggttgcagggagccaacatcacgccactgcactccagcctgggtgacaaaatgagactccatctcaaaaaaaaaaaaaatttatgagcactgaaaatatatgtacagtgaagcactgcttgaattaatataaaacgaaagaacccagccaataaaggactgcctaactatagctgagaacatccatgtgatcaaatgatacagagatgcaagatggagatcttaggagaataagggtaactgcaggtgctggccaggccgtgcatcacatgctgttaggtaaaagatgacgctgaggagcagccaataatgtgatcccattttttaaggaacaaaggtctaggtgttggtatgaacatgaacaaatccctgaagaaattcttctgaacccatttactgggtatctgatgggaggggagaaatgccaaggactttcaccttctactgaaacatttcctaatgttcatttttttctttttttctttttttttttttagatggagttttgctcgttggccaggctggagtgcaatggcgcaatctcggctcaccgtaacctccgcctcctgggttcaagcgattctcctgcctcggcctcccgagtggctgggattacagacgtgtgccaccacgcccagctaattttgtatttttagtagcaatggggtttctccatgttggtcaggctggtctcgaactcctgacctcaggtgatccagccaccttggcgtcccaaagtgctgggattacaggcataagccaccacgccaggcccattttgtttcttttacaagcatgtgcttttgtaagcagaaaaactctaccacatgagattggcatgggaacaggagacaaatcaatagaacagaactcaagtctagaaacagactcctacatatttgggaatctagtatatgaggaggacacttcaaaccacaggtgaagataccacgtcggatgacttctggaaaaaaaaaaatcgatccctacctttctgcatacaccagaaataaattccaggtggagtaagatttaagtgtaaaaaataaaaccctaagaaaaaaatataaatgaatgttttataaccttgggatacaagttgggggagtctttctagggatgataccaaagggaaaactataaaagactgataaattttcctatctaaaaatgtaaaacttctatacacccctaactgccatgaactaaattattatgatttctggaattcatcatcttaaaaacacactctccatcttctcatgaggctgggaaacaggaggggctaataaacttccctctgccttggagaccaggccagatgtgaacggggagggcagggaggggcaaaggtgttgaactttggggaggtgcatgaaccaagacccctggaacgcgagagagtggtctgatctagaggaagccctggggtctgcaggctgtaggaggtgtcccggaatgagggcgctcttgtggatggaaaagctagttcaagctgtgggggcacccacaggcacatggtggttgcagaggtgggaggaagacaaaacaagaacagggccccagatgccgcaggggcagtgtgtactgctccacctggcagaggtcaccagtgattctggagaatggacgggataccctgcggcctccgtggcaaagcctgttcctctctgtttgcccaccagacttcagcagatctgtctcctccactgcctgggagctcccaagggcggagaagctctgatacactgttttcctctagtcccagtgtccagtgcagggctgggtacctgcggtagctgggaaggggagcaggttcccaggcagctcacctgcagggctgtgccccccagttcccgctgagcactcatgttcagcagaagatccaaggctgtctgcgtggccatcgctgtcgactcctcagctcctgggtggggtgggacctaagcctgacaaagtgctagaaaactggcacccaataccaccccctccccatcttccagcccccaccagcacgacctgcccctgcccaactcagaggtcctaccctccatgagctcctatcctcctacagagctcaccttgctggtagatgatggtggcgccgcccagggtgtcagaacagagcaatgagggagcctcagatgactggaaagttgtcgcctctgggggtatctatggggtggagatatggccacgcctgagaggggccagcccagattcaagtgccatttgccaagcacctctgatctgccagatgttttacatctgttggcttgtttcatcttcataaccacttttctttttttttttttgagatggagtctctctgtcatgcaggctggagtacaatggctcaatctaggctcactacaacctctgcccctgggttcaagtgattcttgtgtctcagcctcctgaatagctgggattacaagtggccgccaccacacccagctaatttttatatttttagtagagatggggtttctccatgttggtcggctggtttcaaactcctgacttcaagtgatccacccacctcggcctcccaaagtgctgggattacaggcatgggccaccatgcccagcccataaccagttttcaaaatatacgagctcagtgctacagatgaacccactaaggctcagagaggtgaagtggctggccaagaatcccactcctaatacatagtagggtgagggcttgaacccatgactgtgtgattccagggcctgtgatctaccagcaagtcatgtggtccatctttccagggatagtgtgtcagctcacgtggcagagactgctagctacctatcctgaggccatcctcctcttccctcttgctaacagaactctgattttcaccagggtggcaatgtacccagctccaagacatttctcagcctcccttgcagctaggtaaagtgtggccacatgactaagcaacgatcttcaggtgaagttcatgaggaatgatggatagatggtaggtatcctttttgcctctcccccatcccttcctcctgcttcctgcctgggatgtggctgggaaggctggtgctcctgcagctatactggaccatgaggcaactacaaagatgaaagtcatatgcctgggatgactgggcaaagatactgagaacttattcccttacgactgtataatcaccgcaccagccctagactgccgacctgtggaattcttgtataagagagaataaaaactatgatcacagttaagttactggtgtttccattctctattaccagcactagaaagccacccttactctaagcttagggctggcatatgtgtgactcagtgagtttttaccacagtctcaagaggcagggattattttgttgcatctcaatgtgcaaatgatgctggggctgggagaagcggcctcactctgtcatcctgacccatgccccgaccttacctcaggaggtcctggggaactgggaggtggtccaggggccgcactgtgctgctgcttcagctcctcaatctgctgcagagagaagaaggggcgacggcgggaggggggctcctcagggtggcgcctcccccattcctcgaagctgcttgcgtgtcggcaccgtacgtgcaggcgcaggttcttcttgtgccgtgtgctgaagtggcagtactcacaggcgaagggcttggcccctggaggcacatgttggggcatgcttaagtctgcccgtccctagcctaccccctccaggaatcctttcttgaccctaaggatctctccaactgactgacttccagcgattcattcccgtatgtaggcaaacacatgccactgtccattctggtggcccaggacagaaatgaatcagggccgccctctgcactcaagagccttcctgtgcctacctatttgcaaagtcatgtgactacaagctcctgtgggtcatcacaggactctggctaagggaacccctggctccttttctgtaatcgcccctagtgtgctgaccagggagctaggcaccaaagaaacaatgtttgcagtgcagcttctgtgggccaagccaatggcgttgcttctgcagcttcatctgccaaggcagggtctggaagagcctcctctccagccccagtgccagcacacacaaggctcaaggaacaaatggaacttactttcatcatagccatatggcaggcactctgattcccccatttcataaatatggaaggctcggagagggcaagcgaccggcccagagccatccagagaacaaccagccaagcaggaacccaggctcaggttagggtgaatacgcctatgggaaattctctttacacttgaaggacttgggctgttctgtggctggggctaccgagggggaaggaagaggatgggagctaagcctctgatcaggggtacagggcactgagggctggtgagtggggctggggtgtgtccagcctgacctgtgtgcttgacagccacatgggacagcaagaagtcctctcggaaggtgcggtagggacaaaagctgcatttgaagggcttgtcactgacgtgggacaactggtggttcagcagtgccttcttgtcttcacaaacaaactcacagaactcacacttgaacctggaggcggttagagggagggaagctcagtaatgagctggggactgctcccgtccccaggggcctccaaggggatgtacctgcggttggcaacagcctggatgtgcgtgagcaggtgcattttgaaggtgtagcgcttcttaaaggactttccacactgtgaggggtggagagcagtgagatggcgatcaccctccatcacccaggggaggccctcctctcagccccagccctggctcccacccaccttgtcacacatgtggggcttctcagtgctgtgcgtcttcatgtgctgcgtgagtcttttctgcatggggtacacacggccacacacagggcaggggaaagagctcagctttggagtctaggaaggcataagaaggggccagatggagaaagaagtggaggagggaggataaaacctcccctcttgtcctcacccccataaacaacccccgggcaggttcccttcccaggccagcacgccagactcaccggatctggcctcttcttcctgtggggaaaaggccgaggaattagaccagagcttccccaagcccactctagaccctctcacactgaacagacccagcctcagctatgagcctactccctgccaaggcccctttctcttagaatagtgcttccccagctggagttcactggggaaaacgctaaggggcacgctgtaaataacatattctgcactcaaatatatttgtgaaatggtacattctttctgtctgtcaatcacaaaatgttacttgcatattaaaagctctaaggatcagttaaggcccggagtttgagaccagcctgggcaacataacaagacatcgtctctacaaaaaaaaattagtaaataataaaaagttagccgggtgtgctggttagcacctgtagtcccagctactcggaaggctgaagcagaaagatcgcttaagcctgggaggttgaggctgcagtgagctgtaattgtgccactctattccagactgggtgacagagtgagaccctgtcaatcagtcaataaaagctctaagaaatcctgcaggaaagaggtgttgaacagctctgcaagctggtgaacctacactaatcttacttagccacagaaccttttttttttttttttttcatttaaaaaaaagaaaccttaaagtatcttgggctggcttttccacacacacagctggagctactgtcccaggggatctgtctccaacctctgctcacacaccacctctcatgaagcgaactccttcctgaagctcgggatcgaattataatcctgtgagcaatcattaggtgcataagaacttgtgtttctctgtctcaggtgcactctcagccctgtgagagatgagtaggatctggagtccagaagatcttggatcatttactgaactcctttaggtacacaatttccttcaatcccttcaacaactgtccccgtttgatgagaaactaaagctcacaagaggtaagaggctgagctggggacctcaaggcctggtactgtcctgttctaagccaaatgaactggggtgaactgcctttctgctcatgcctgtagtgtgcagcaaatggggctggctcagagcaggagcacggtaagtgggaaccatggttatcccgggcctccacttccccacccaacctggcctctcttgcccaggtccctcccacccccacactgaccggtcccggctgtgcacagcggcgtgccgaatgacgtccttccggtagacactggtgtagctgcactcgtcacacttgtagggcttgctgcccacgtggttgaacatgtgctcctgggagacagacaaaaggatggtgggctggggcttggcctcctctcccatccccgtccccaccatgcctgtggccacagtcttagggttgctgcgggagcagctcacagaacacaggcatgtggacaacacaccccgacgcaagggtcaaaacctaggaaggcccggggactgtccccagcgagagcacccactctgtgccaggctctgtgctggctcacaacttgacaaagaaggaacctgagtctcagggtggagggaccttgcgatggcagagcttggagctgaagccaggcagcatggcgccgcagcctccacctctcccactgcgtcacgagacatcttctctgcagaacccacataacagcccacagcacagcgtgcacagagcacaggggctcgctctgaccaccgtgcccggaagtaccctctcccacagctgccaacttgcacattggccaggccgagccacagtttcctgggggtcagtagaatgggactatggacacctacgacctcattgggctgcaataaggatttaattatccagttactgcataaaaggctcagggctgctgcaggccacatggtagcttgtgttaaggagaaaaaggaaccgtttttttttttttgtttgtttgtttttttgagacagagtttcgctcttgttgcccaggctggagtgcaatggtgtgatcttggctcactgcaacctctgcctcccgggttcaagcgattctcctgcctcagcatcccaagtagttgggattacaggcatgcaccaccatgcccagctaattttgtatttttagtagagatggggtttctccatgttggccaagctggtctcaaactcctgacctcaggtgatccacctgcctcagcctcgcaaagtgctgggattacaggagcaagccactgcacctggcctaaaaggaacccttttcttgagacacatgactgccatctgctggaaatctttctaacacatggaatcagatgaaaacagttttatggcgtctgtggtggtgaagatatgctgccactgtgcactgtgccgcctgcaaaaccgcctgtggcagcccttcccagcccctccccacattcccgcaagctctgaggagctgagcgttcttcggtacgccagtgagccagacacgcgttctgaagagcagcaggagagcgtgacccagaatgctctgtgactccattctccctcagtggcaccagctggcctctgcttgccttcttcaccctcccatgagccccaagcctctttggctcccgcaccttgagcgaggaccagcggcgggaacgatagctgcactgcaggcacttgaagagctggggatcgccagcctcatgggagttgacgtggaagcgcaggtcctcgtgggacagaaagcgagaaccacagatgcggcacaggaagggcctcaaaagtggtttgggcgacttgtaatagtacctgcaggatgagagtgtggcggaaaggtctggtggggttggtggcttaaccacatgcatgccccaccctcacctctgctccacatacttgcggtatttcttgcctaggaagcgcctggaaggtcgacctcggcgccggggcagagtgtcatgctcatccgggcaggagggggctgcgttctctgcatctgactggctcacaccagcttccacaggggtcctgctcaccttgcccatggccaccaggtgtcctgggcctgaggagctgggagcctcgggatcctgtggctctggagggctctgtccactctgggaactcactagaggctctccttccacacctgccacggacatgccaggtcacaagccagccactgacacaccaggacagacgtggacaagtgggccagaggccagccaaaatatcctcccacccactcatcacagaccactgatgggtgcattgagtcacatgacacagacagcctgtggttagagggcagcatggatactaccgcccaacagccgacattctgtcagcacagtaggacctggcctggattagagcaacggcgagagctgggacctcccagtcaggagacctgggttccaggcacggctctgtcactgacatgctgtgcacctacagacaaagccattcctctcccggagtctcatttgccccatttatccaagggaggccagaatggcggctttggtgacttcacagaacaatctaaggctcgggaagcaataggagtgctttaacactggcattccccagggaggtcaggcagctggagggctgatgggagggaaggagggagatgtgacttccatgcttgcaaaccatttggacaatctaaatctgttacctcttcaaaaacattgacagtatttaaatattaaatatgtactagacaaattaacaatacagacaatgcaggtaatgttctgcttcttgactgggttatacaggtgcttggttacacaggtgtgtgcaccttgtgaaaactcattgacctgggcagaatatgtgtaactttccatacatatgtgcctcggtaaaaaggcctttttgaaatagagactaaagaatacaataggccaagtgcggtggctcacgcctgtaatcccagcactttgggaggctgaggtgggcagatcacctgaggtcaggagtttgagaccagcctggccaatatggtgaaaccctgtctctactaaaaaaattaagtcggtgtggtggtgggcgcctgtgatcccagttactcagaaggctgaggcacgagaattgctcgaacctgggagacaggggttgcagtgagccgagatcatgacgctgcactccagcccgggcaagagtgaaactctgtctcaaaataataataataataataataataataataataataatacaacaactctccaaccataaacagctgccactgtactcttttgtgtgtatttaacccttaagcaatcctaaaaggcatgctgctataacctccatgcataaataaagggactggagatttaagctccaagtcacacagactgcaggcggcagagctggtgctcacaccacggctgggtcctttctgtccccagccagtaatgctccgaaccagggctcctctgatagtcccaggcctcagacttattcctctcttctcatttcagtaatatttaaaacttatcttacgcattcagtgataaagtcccaaatttctcttttgctatgacaaattgtggtgaaaggcatttccataaagctgagagagtttcctgagtcagggtttcttgagcttgagtctttgagggctttcccctttccctggaggcctgcaggtgacccggtttgagacagctgccctgcagggcacactcagtccccagaactccacagagacaagcagggagagaggccactcctgacccacccacacgagcccctcccaagaccaagcctcaccatctgggaggtctgagatctccaggcggggcagcttccggggccggccaggtctccttcggggccttggggtactgggggtggggcgctggagccgaagctgccggcctcggggctcatcctcagctggattatagtcgctatcctctgtgggggacagtaaagttggtgaacagtgagtggcgggacctgccctttcagccctgaccccttgcccagctcacttccctacccctgcatactcctcctccaagcccacagcgatgcctcctccagaaagccctcctgatctcctctggctgacttggcgttcctgccctgagcccctgaagttctttctctacccttcctggcacctaccactagctcataaagcaccttcatgtgaatagggaaaaggcaacccttcctccagacactgtacagccagttagaaaaaagtttaaataaacattgaagtccacaaactctacggctgccctatccaaaacagctgccaccagccatatgtagctattgagcccttgaaatatgcctagtccaaactgagatataattaagtgtaaaataatgaatttcaaaaaattggtattaaaaaactcaccaataattttttttttttttggtattttagtagagacaggatttcaccgtgttagccaggatggtctcgatctcctgaccttgtgatccatctgcctcagcctcccaaagtgctgagattacaggcgtgagccactgtgcccggccaaaactcaccagtaattgttatgatgactgcatactgaaatattttagggccaggcacagccgctcacacctgtaatcccagtgctttggaaggctgaggtgggaggattgtttgaggacaggagtttgagaccagcctgggcaactcagcaagactctgtttctttttctttctttttttttttttttctgagacagagtcttgctctgtcgcccaggctggagtacagtggcatgatctcaactcactgcaacctctacctcccgggttcaagcgaattctcctgcctcggcttcccaagtagctgggattgcaggtgcccgccaccacacccagctaattttttgtatttttagtagagacggggtttcaccatgttggctaggctggtctcaacctcctgacctcaagtaatctgcccgcctcagcctcccaaagtgctgggattacaggagtgagccaccatgcccggcatttctctttttttttttttttcttttttttgagacagggtctcgctctgttgcccaggctggagtgcagtggcacaattacagttcactgcagccttgaccttctgggctcaagtgatcctcccaagtagttgagattacagacacataccacaacaggctaatttttgtatttttcatagagatggggttttgccatgttgtccaggctgggagaacccgtttctacaaaaattaaaaaattagccaggcatgctggcaggcacctgtagccctagctactcgggaggctgagatgggaagatggcttgaactcaggaattcaaggtaacagtgagcaacgatcatgatgctacactccagtctgagcaacagggcgaggacctcctctcgcacctttacttgtattctatttctgtggggcaaatgtgaacagggccccctgtgctcttttccagtgtgcaccctgcacaactgcacacagaagtcctggtcccagagcacaacctcctctgtcttatactggagggacctgtggatgtgtctgtgccaattcctctttactggccctccaagtgaaagctcagtgagtatgtctagatgggcatagggatggcaggcctagaaaccatggtggcctaccctccaggtcatcaatggctccagcgtctacaatgtcatcatcgtcctcctcctctggtccctcttcctcttggctcttggtggaggtgctccacttccgtagacgtccttttttaccagctgctgctgcggctgctgctactggaagtggagggagggtaagacaagcttgccatgtctggctcccagcaccccacccctacccatgcagtccaagcaggtaggctgctactgacgcacctggacggaagtggcgttcccgcatgtggcgcagcagtgtggccttggtgctgctccggtactggcacatcttgcatttgaactgctgcaccaccaccacctccatcatggcctccaggctctgcaggtccggctcttcggcaccggaggctgggggcagctgcaccggggagctgggcccaccctgtgcctccaggcatgtggatgtggatgtggggccatctgccagggcctcaatggctgctaggctgtgggccaaggtggaactggacattggtgatgtcatgggggctcctggggatgggtgaggcaattggagggtggttaaatggagggcagcactggccatgagctatagctacccctcccaggcaggcccagggagtgcagaaccaaattccccaccagaggccaacccgtcagtaggaaaactgagacccagagcagtggatacccagccagggccacagacggaatccgcggcagaacctgtcctcacctatccccctgcccactgcaggcctccccgattctggcacctggggtcttaccatcatctgggccctgtaggatcaggtaccgtgtggtctcggccccgccatcctcagcactggtcacagtgatgcagtctgggcagagatggggaagggtcacacctcctggggagggggtcccagcaacaggcccacccccatgggccccactttggcctgtgagcagggctggtccacactcattctggctcccatgtgcgactgcaaaccagctgtgtcacccctgagcctcagttgactcccctggcagggctgtctggaggtctagtgtgacatgctgactcagcagccggcccacacttacacaagatgccacagctacaccagctgcccaggctttgaccaccaaacctgggaagtcctccttcctctccaaacttctcaaagtaaaggaccagctcctgcaccactttcttagggttggcttcccagactatcccagggctttttgaggtgctatagcctctataaatatcattaacaaaaagtgggtacagcaccatgtgtcacggctcatgcctgtaatcccaatactttgggaggatgaggcaggagaactgcttgaactcatgagttcaagaatagcctggtcaacccagcaaaaaggtggtgtgcacctgtaatcccagctaccctggaggctgaggcagagaatcccttgagcccaagagtctgaggttacagtgcactatgattgcaccactgcactccagcctgggtgacacagctctggagtcagactgtctgagctcatggcccgacaccccacactgcttgctggtgacagtgggtaagttatgtatgtccttggtgcctcatatttttcatctggactgtgaacattaacatcctctaccttttggggttattgggaggattaaatgagctactgtatgtaaagtttagaacagtcctgggcacaaggtaagcaataacagtttatattatttattgagagtctgtcatgccaggcgctaggctgagaactttacagtgttgtctcattaaatcctcatttaccaccatgagacaggggtgactgttcccactctgcacattccacatgggaaagtaatctgcctgagttcacacagctagggtgggcacagctggctgccggacactgcaggaaaacccctgtggggctcctctgcctgactcactctggatgaggtcgggcccgatggtggactcgatgatcttgtcgatggccgagcccaggtccgaggaggaagctgtgcagtcggacaccagcatgttggggtctgggagtgcactagagtgcacaagtgctgggggaccgcctgtcacccctgccactggcccatgagacacagacgatgaatcagggaggtagctattaggcagggggtctgcgctcgagctgctctcagatacctcctcctgaggggcatgaaacagggagggaaaaagtttagcagctgggtatggggcagggcagcctgccagctcccacttgctagacagagctctcaggcccaaggacatggtcagtggagccactcatgccctcagccccacggaggaccagtgagagaggccctccagtcacagagtcccccaggaaaaagtcacagggtccctggatctcatcagggaatacacaaaaataagagaagggactcctaagccacagccagggggagctattttctttgggcttttgcataaatcgttccctctgcctgaaactcttcccagcatcaccctatggctaaatcttacccagccttctcaccaccatttagctggtacctcttctaggaagtcaatgctggctttgaggccaagtcaggacttcttcatcctcagtgctgcagctgcctgtgtccccagcaccacaccactgtggggttcattgtgccttttaacagcctccatgccagactgtgccctccacaagggcctggaccaaacttgtcttttcctctgctgtatttccagggcccagcacacgctgagcacatggtaggcccccatctctgctgaactaatgaaaccccaggaccccaaagtgatgaccactgctgtgtacttctatcacgtgatatactgaatatgaccattatcttgcatataagaatggctaatacttactgagtgcttacaatgtgctgagcactgttttaattattagctttgcatatgttaattcatttcatcctcacaaaaactctatgaggcaggtatatttaccattcccactttacagacgaggaaacagagctagatgttgggtagcttgctcaagatcacacggctaggaagtggcacagccaggaggagatggtttacaaaatgtttgcaagaggatgtctggtgggagctcacaatcaagcacccttgaaagcaagtatttctgctttactttagccgggatactgaggctcaaagaggtctcccagtaaactggaggcaggacccagtcttaacccagggcacttgcgtttttttttttttttttgtagagatgaggtctcgctatttgcccaagctggtctccaactcctgggctcaagtgatcctcccacctcagccttccaaagtgctgggattacaggcgatgagctaccactcctggcctagacatctgcctctcaaagtgtgaggactgtgggtagtatagtagctaagaccacagcctagatttgaatcctggctctgtctgcactctgtacctcggcatccttttctataagatgtgggaaaaaatggtatgtgtcttagaaggtatgaagctcaaatgagaaaatccattttaggggtttggcttggtgcctggctcacagtaaaccagaaacaccaagtattagctacaaacaagccttgtttcctcttggctgtcaggcactgctgctcgcggtccttgcctccacccacgccgtccagccgggtccatacctgagaacggctgccgcggtccgagctttgccccacgccagagtcatcggcctctgcctgccccggggcggccgcggcgtcgctgctgtcggcggacacggcttctgaggtgcccacacccaggccgctctcagagggctcctcgggccggccaggcccaggggccgcgtcgctgctgctctccacctcgttctcctccatctgatcggcgggctgcctgacagcggggcgtagggtctgggaacttcactctgagaagagaggtgaccgtggctggaacaagtgggccatctccccagccccggcaaccacggccacccatttgcacccctgcgcccattttgcagatgcgaagattgagtctccgacggggcggagcttcctggtgtattgcgaggggagctcgggaaaaacttgacggagaagctgtgcttcccaggctaaggcccttcccgggagggtggtcaatggctggtaatcttgaccctttccctcgcccccacgattctcgtggagcgttccgctctgtgagccccatccgggcccagtggttcagcccttcggcccccgcgtccccccgggttgcagggccggtggtacagcccgctggccccctgggtcagtggttcgctcccccccggttcccctgcggaggcggctgacagcgacggtctcggggcctggcgatttggggctgtccccggcgctgcctgtgctccaggcccgacgccatcttgtggtggcgccgggtttccgctcaggcaagtgcgagagcgactaaagggcctgggaccccggggccctgttcggacagccccgccggcctgggacctcgcctccgggtatccccgcagtgtgacctcactccacggcagggtacggtggggccgcctaactctacccgaagctcacccgaggctttcgtagccacgttcctctctgactccggcatcgacgaggtcgccatcctctttcctccgctgcggaggaacccatcggcctattgtaggccggaactacttcccccgctggccccgggaaagacacattttcagtgttccggaaggtcgctccgaggcctcaaaaccataatcgggtctcaacagactctgggactttatacgtcgcccggtgtttggcactgagcccactatggtttggggactactttatctcggcggagtgttacgtaggaagtggttgtgacgtcattctggtcccttccctaggccgcagggttgggcgcggcgaatgcgcgccccgctctcttggggcgtggctcccagtggggggcgtggctcccggtggcttggccgcgcccctcctacaacagcccggaagagcgtgtggccgcgggcgactttggcttggccaaagaggaattcatgttgtcagtcattttacctgactcattacttattacttagcgcgctgctgcaacccaatcgagctctgcccgttaggtttgatgtgttttgttgggaagggaatgtataattattgtacagatagggaaactgaggtctgggtatgggaagggctggtccaaaatcacatccaataaagggactcaggagctaagtacggatggcaggagtcggggaaatggaaagaagttaatgcttgtcccttaggtttgtatacatatttgttaacattaatagagctgaggccgggcgctgtgagtcacgcctgtaattccaacactttgggacgccaaggcaggagaatcgcttgatcccaggagttccaaaccagcctgggcaaaagagcgagaccccatctctacaaaaaaaagaaaaaaaagaaaaattagccaggcatggtggcgcgtgcctataatcccagttgctcgggaggctgaggtgggaggatcgcttgagtctgggaggttgaggctgcagcgaaccgtgatcacaccactgcacttcagcctgggcgacagagcgagaccctctttcaaaaaataaataaatacaagtcaactacctatcctttaaaagtggagaaagaaaaaaaattttaattaaaagtcagctgcccttaaggtatgtccttcctccggaaatgtcaccttctgttttaagacttttagcagtttgcagtggaagagcacaagagggagtaaggcgctctggtttttgtccctaagtctctgtagttccataggctattttccttaattgaaagatacaaattttgggggaaaaaaatctcaaaaaaactcctaagcaggctgggcgcggtggctcacgcctgtaatctcagcactttgggaagctgagtcgggcggatcacctgaggttgggagtttgagaccagcctgatcaacatggagaaaccccatctgtacgaaaaatacaaaagcagctgggcgtggtggcgcatgccgtaatcccagctattcaggaggctgagccaggacaatagcttgaacccgggaggcagaggttgcggtgagccgagatcacgccattgccttccagcctggggaacaacagcggaaactcttgtctcaaacaaacaaacaaaaagtcctaaggagaagacctattaataaggagaaaaggtccgggctcggtgggtcacacctgtaataaccagcactttgggaggctgaggccggtggatcacttgaggtcaggagttcgagaccagcctggccaacatggtgaaactgtctctactaaaaatacaaaatttcactgggtgtggtggcgcgcgcctgtagtcccagctactcgagaggctgaggcaggagaatcgcttgaagcccagaggcggaggttgccgagattgtgccattgcgacaagagagaaactccgcttcaaaaaataaataaataaataaaaataaaaaggacaaagggtgctttgagctgttatttgtgtgcacttgtgtatgaggggattcatctggtccttttcttaggtaaagttttctttcctaggtttcccttttgggttgagggaatggaacaggaggcctctggataggttaggaccctcatcccctatcccttgcaaccagcaggaccaggccccagagcagctctgaagagctaggtcagcactggcatgatgacatgttggttttactatctccaggcagttttcccgtgtggaccccattcctcagccctacagaagcatctgccccctcatgccagtagggtagtagggtgcatcctacatctgaccaagtcacctctcccaagtttggggtactccgaagtagccccacagtaccctcattcccttccccactaagactgaagcctcctaggaggtagagtctgcagtgaactatgagtgcgccactgcactctggctttggtgagagagtgagaccctgtctattaaaaagaaaaaaaaaagactcaaccttaatcctggcctttgccacagcatcacaagattgcagaatgtcatggtacagatgaaacagactcatcatgaaaccgaagaggagcccaaggcccagagggggaaagctaacagcccaaggtctcggctccttggaaacaacataccagaacccttccatcacaaagacaagcaggcaaatccttgtattctgcctgtgaatccagggtttgttcctccagagagtgcagtctagttctggtctcagctttatttttttgttttctctttaaaatttgttttatcttttaaaaaattgtttataaagatggggactagctattttgcccaggctggtctcgaactccatggccccagcttagagagacttatggaagcagtgaaggggctctgggtcagaggacattaaagtggaccattgagaaaaatgtagaagagccaagagggaaagaggagggaagatgccaggcagtgtgtgtgctttctgagtcatgttttgtttttttttttaatttgcttccacagagctttatttccatttggatcaaggcttggaagaaggctccagggtaattaaaaagctgcctagtggctggagggagaggcttaggcagaagccctgatactttgggaggggcccttaaggctcccagtcgtgcttgagggtgggtgagcctttccaagagaaccccacccaggccagcctgggggccagccaccctgggaaggttggtcaagtggtcgcccatcttgatgagtttcacttcctcatctaagaagtgactctctaggaagtcacagagatggaggtctgtgcgggcaggactcagggcttgaagatccaaaagcggcctggttcagatttttctccagggccatggcggcttccgtggcattcagggtttttaaaatttatttatttattattattttttttttgtcacccaggctggagtgcagtggtgtgatctcagctcactgcaacatctgcctcccaggttcaagcgatccacctcagcctccttagtagctgggactacaggcgtgtgccaccacacctggctaattttttttgtatttttagtagagatacaatttcaccacgttggccagactggtcttgaactcctgacctcaactgacccacctgccttggcttcccaaagtgctgggattacaagcatgagccaccacgtccagccgtgtccagggtcttatctaactcaatttgggccagtttctggatgtcctggaagagaatgcagccgccatactggttttgcatctttaaggcacccttgcgcttctcctcggccaattcgtggaagaagtgacccacgccctcccaagccacatcgtcacagtgtaagtagaagcccagagagaggcagatgaggaggcctgcaggtgcaaattgagcaggtggttcacggctgcctccacctcagtggaataattctgacgaatctgggagctcatgggctggtaagaaggagctaaccacaaacaatggtgttggctggacccagaagcagaaggtggctaaaaagatggtccctgaggttgcaagtggagaggagattgatggtgagaggctggaagagaggaagtcccaggatctcttccgtccaaacactgttgaagcaagacacagatccgtgggactgcccaatgtgactctgctgaggagtcatggtatcttaaggaaacaggagttgttaaatcatcttccactgtagagaggaggcggctgaggctcagagaggggaagagacttttccaaggtcatgcagccaggaggatggagctggtatatggaaccaggtctgcctcattccatagtaatcatacacttaggccgggtgcggtagctcacgtctgtaatcccaacactttgggaggccaaggcgggaggatcacttgaggtcaggagttcaagaccagtctgaccaacctggtgtctaccacaaaatacaaaaattagccaggcatggtggcacattgcctgtaatcccaactacttgggaggctgaggcaggagaatcgctttaacctgggaggtggaggttgcagggagttgagatagtgccactgcactctcgcctgggcgatagagactccatctcaaaaatacaaaaacaaaaacaaaagcaaaaaaagaaataccttaaattactctgtgccggtcaccattctaagtggtttatttacattcatttatttatcctcacaaccaccctatgaacctacgaagtggttgtcattattatctccattttacatatgaggaaactgaggcacagaacaataaaagaatctacctaagtaaaggatggagctaggattgaaaactaagcaatctgttaggctgggtgctgtggctcatgcctgtaatcccagcactttgcgagaccgaggcaggtggatcaccagaggtcgggagttggagaccagcttgaccaacatggagaaaccccgtctctgctaaaaatacaaaattagccaggcgtggtggcgcatgcctatagtcctggctactcgggaggctgaggcaggagaattgcttgaaaacccaggaggcggaggttgcggtaagctgagatcgcaccattgcaccccagcctgggcaacaagaatgaaactctgtctcaaaaaaaaaattattaatacttttaaagactgagctgtttaagaatttttgggggaatgtttctagcagtgactttttttggcctttttaacataatgatagtgtaaagacaggagccttacaacttagtcaaagcatttcatgtgcagtccttcttctatctccttaaaatatgtatttattttacatacagacttttacactaactattgaaaaataaagtaggatctgctacagtttcccctgaaaatttataaaaagtgttgagattgttagaaggcagtttttaatacaggtgcactaccctaaaagacttgtctattgtcaataaagtatttgtgaaattattatttctgttcagaaatactatttcttaaatctcctgggaatttgtggcatactaaagcacattcaaagttctaatgtgtttatgagctcattttcaaaatagtaagtttgtcatctttaaaatgaacgtaacttgcttccttgatttctgaaatgaattaactgaagattgctatagtaatctttatttcatctttctagagttgttggcaatttttttatacaacagtgaccattagagaaggggggaagggattttgggtgtgtatttgtaggtactaagggatttactaaatatagtagagcactgtcacacttgttcaagtagtttcaaacgtagaaaattaagtatcagaggcaggtatagggagcaatgtagtcttttttttttcttcaattttaaaaattttaaattgtggtagaagcaatgtatccttaaggtgaaaaacctacctcagttacatgtggtttgtgttttctggattaatctggattttataattagaaataaaaatgtaagattttgaatccacttaataatttcttgaaaataatacaagtcagtgtaatagagaagcattcatatattcaacactgtaagacaaaacagcagagaccttggatttgataattgatctgatatcctggacagtattcatatgtacagtgataggtatgtttctttggggtttttttgtgtgcatatgtgtgtagttttatcgttctgagttggtgaccagtaagttccatgtagtgctggcacttatttaataactattcatgattttgttaataacttgttacaggattcaggcatatattttcagcataagaagccagacacaccagcttgtcattggagataatatattaagtgagaaaaacattcaggaatcagaactttaacatgttaaagttagtgctaaacatggtcatattgggtctgaacctatcctaatatgtaaccataaagcttgacttttgcattggaactatgctttcataaataaaggatatcccatgggattgtaattgtaatcccatattatctgtaattgtaattcccatattatctgagaagtagtgtgacacctttcttttgttgttacattaagctgaaaacataatactaatagacgactaacagtttgcttatcaggcacatcaactaaggcacctccccccatgctaagtttctcctggatatatggaagttggttgtttcccagtttaaaaacttgaactaatattacctaagaaaacctgagcccatattgtttttattttacttagctagaatctcatagcatgttaaagtcataccttatccccactaaaaataactatgtctatgtgagaggaatattatgtgtgggagctgtattaaatactattataggtgttacagaatctttaaataaatggacgtggaccaaccttccatctagtagtgtacgatctatatagtgcatgtcagtagcacaaaatgcagtcttagttagcattagcctgtctaatctgaatagtttactcaaaagtacttctttgtgttaattattcagccattgtttttagatctagttaataggttctatttaatttgctgcaacatttattgaatgggtgagtgaaagaactgatgcatattgggaaatatcttaccattttttaaagataatgttacattaggaaaagaacacttttaaggaatttatagcagtgatgaaatgaattcagtctatatcagatacaccaaactgttgatggtatttaaatgtgactgcaagttagtatttctgtatatattattgattactggtttgtttttagatatgtaagtctgtcctaatctacggttcacgtattgacagttgctctggtaataatagaatgttagtgatgatcacttggtggatgttgattaagtgcctgtgttttgttttgtttcctcctctggataccaaataggtgtatgctacttttttggtgaacttatttcttggaagatttggttatgctattcagggtttttattcttatgtttttcttctaaacttaagcagcatcctgctgctaccatattaaagctcaaatttaacttttgtggaaaaatcagctaattcaggtaatccaaatatttgtggaaaaacatctgggtaatttattgaccacattagtattgtgtagacagctttgattattcccattgcataggtttttattgtagaatagtcaacttaatatagattcacttttaatttacatgtataaagtaatactcaataaaaattttttcatttatttaaaaaaaagaaaactaagcaatctggctctagactccatacttttagattgctgtaccatttctcatcataatgcttgactcttaggtgatattttgtcttctcctgagtcaggcctggtggttactattttcccattttacagatgaggaaattgaagcccagagaggggatttgacttgctcaagatcacagaaattttctggtgtaatggaaggggctgtgagcccaggccagatctcctgcagtagataataatcacactagcagtttttaattaatttatttatttttttgagacagagcatcgctctgtcgcccaggttggagtg[140 bp omitted]gtttcaccatgttggtcaggctggtctcgaactcctgacctcgtgatccgcccacctcggcctcccaaagtgctaggattacaggagcgagccactgcgcccggccactagcagattgtttgtttgtttgtttgtttgtttttggcttttttgttttttctttgagacagggtctcactctgttacccaggctggaatgcagtggtgcaaacatgggtcgctgcaaccactgcctaccaggcttaaacagtcctcccaccacagcctcccaggcagctgggactacaggtacgcgccattacacccagctaaattgttttgtattttttgtagagatgggttttccccatattaccccggctgggtgaatgtttactgggtacttaccaagtatcaggggatgcattcagtgttttgtatgcatttttatttttattttgagacaggatctggctctgttgcccaggctggggtgcagtggcagaccctggctcactgcaaccagtcctcccaagctcaagtgatcctcctacttcagcctcctgagcagctgggactacaggtgcacaccaccacacctggcaaagttttgtatatttttttggtagaggtggggtttcaccatgttgcccaggctggtctttttcttttttaagatggagtctcgttctgtcgcccaggctggagtgcagtggtgcagtctcggctcactgcagcctccgcctctcaggctcaggcgattctcctgcctcagccttcgagtagctgggattacaggcacgcaccaccatgcccggctaatttgtatttttagtagagacgggattttgcggtgttggccatgctagtctcctgacctcaggtgatccacccacctcagcctcccaaagtgctgggattacagatgtgagctaccttgcccggccctatgtgcatttttaaactacagtcacaacagccagagatattagatgctctctgcattcccatgttacggatgaggaacctgaggccccagagcagtgactgtctgaggtcatgtgcttgatcgtcagcagaggtaggattcaaaccctggcttactgactcccagtccagtgctcctcatgttgcaccagatgccccggaagggcagcggggttgagagtaggcagccagcaggtgggtccgagggttcatctctacctgctttcttcatgtcactgctgtctatgggtttagctaaccctgtttttaaaaacctatttatagcttaagactgtaccaccacttgggataatgagtcccttaagttgacttcccacggtgtaaattaagatttccttctatttgtcctaaatctttctctttcagtattggagggggatggggtagtggggaaatgccctagggccacaacacttggatttagaaaataggctgaatgggctgggtgcggtggctcatgcctgtaaccccagcactttgggaggccaaggtgggtggatcacctgaggtcagagtttaagaccagcctggccaacctggcgaaacctcgtctctactaaaaatacaaaaattagctgggcataatggcggacgcctgtaatcccagctactcgggaggctgaggcaggagaattgcttgaactggggagacagaggttgcagtgagccaagattgtgccactgcactccagcctgggccacagagcaagactctgtctcaaaataaataaataaataaaataaaagaaaaagaaaataggctgaagtccaaatagtatttgactgtttgtatgtgatggtaattcctgacaccaggcagcaggcgacatgtatggaaacatctcatctgatcattacaaagacataaagggtaggcagggcctggatttttgtctcctttaatctgtcttgtttcctgtggtatcctcaccattgagcacattttggagatacaggtagatactagatagctatttgttctatgaatgaaccaatgaaccctcattttatagacaaggaaacaaagacccagaatatcaggggtctagccaggaaaacaagacttctaccactactagatgattccaaagagggaatttaggccagatgaagtggttcacgcctgtaatctcagcgctttgggagaccagggtgagaggatcacttgaggtcaggggtttgagaccagcctaggcaacatagtgagacccttgtctgtacaaaaacattgttttttttttaattagctgggcatggtggcatgtgcctgtagtcctagctattggggaggttgtggtgggaggatagcttgagcccaggagtttgagtctgcagtgagctatgactgcgccattgcactccagcctgagcaacagagcaagaccctgtctctgcctctaaacacatacacacaagacacaacacaacacacagagggaacttaatgtggagaattagctacaaagttgttttatgggtagaaatagcaaccaggggaagttgaggcaaacctgagattagcaacttcatgaagctgctacctcacccagggctggaagtattcatatcaagggaggaggtagcattactggagaccagcaactggggccaccctgagagaagctggaatcacagcaggtctgtctagcaggagctgaaccatgaaggagtcattgcaactgctaaagatccccccaccccatccttcccgaagacgagagaaatggaggagaaagaccctggcttctcccttctttctctccagtctctcaccaggacttcccattggccaatcctagccaaaagccagttggcaagggagtccaggaaacatggtttgcagggattagcctctgctgcacggagcagagcagaagggcagagaatggatttgagacaaacagaaaaattacctggcccaaattatcccatacctaggaaggattgcattgtgtatgcattgtcaggcagtgcccctcccccaagtccatgtgacctttttagtctctttatctttctatgtctgccttaagtatcacctcttccaggaagccttcttcccagcagagctggtatttcccttcagcgcgttcccctagcatgctctgcctacctctgtcacagaacacacaccaccgtgagatgctgccagttacctgccaggctcctcgatggacggagcctcccaaagccagtcctgagtctggtttgtttctctgctgagcagaaaatgattgttgaatgagtcagctgttggaaggataacatggggcaaggaactctagagtcagaccaaactgagggtccacaagtctcagtctcctcatctgtaaaacgggaactttgaggagtaaaagagagaatgcgtggcagtgcagttaagctcataggctctggaatcagaacatctgcagtcaacccccagctccgcttggagttacttaactttctactcctctgtttctctcttataaactagggatgatattaatatttcatatggtatctgtgaggattaaattaaactgtgtggaaaacagtgcaagtgcttaataaatgtacctagtattattatgtgtggtgcctagtcacatgcctgaacgttgcataggtaagaggatatatatcaaacagggaactttctttctttctttctttttttgagatggagtcttgctcttgtcacccaggttggagtgcaatggtgcgaatacaggcgtgagccaccgtgcccggcctttaatttttaattaaaaaaaaatagagatgggggtttcactatgttacccaagctggtcttgaactcctggcctcaagcagtcctccagccttggcctctcaatgtgttgggattacaggtgtgagccaccgcacctggccaggatcttgtctttcttgttgaccactgtagccccattaccaagcatagtcactgaaacgtagtaggtgcttagtcaatctttggggttgttttttaggacagggtcttggtctgtcaccctggctagggtacagtggtacaaacatggctcagtgtagccttgacgtcctgagctcaagcgatcctcccacctcagcctcccctgctcccaagtagctgagaccacaggcctgcaccacacgaatttttttttttaatttttttttttttttgagacggagtctcgctctgtcgcccaggctggagtgcagtggcgcgatctcggctcactgcaagctctgcctcccgggttcacgccattcacctgcctcagcctcccgagtagctgggactacaggcgcccgccaccacgcccggctaattttttgtatttttagtagagacggggtttcaccgtgttagccaggatggtctcgatctcctgacctcgtgatccgcccgcctcggcctcccaaagtgctgggattacaggcgtgagccaccgcgcctggcctttttttaatttttattttgtagtgacgaggtctcaccatgttgcctaggctggtccctaacttatggactcaagcgatctgcctgcctcaatccccccaagtgctgggattacatatgtgtgccaccacccctggcttcaatcaatcttttctgggccatagaacaatggctgagtttcatttgataacatcagtctgcctgtgagtccagtgtctagttctgtgaccttcccctctgtcccaggcaccacagaggatattcggcctacaccaccagcccaaccctggcactgaggcctctccaacaggtcaagggaccaccctgggattaaaggtggggactttggagcctgggaggagggggcatgcatggaagcagacaagggtctagagcaaaggactagcaaaggaatctaacacttattgagcatctactgtgtgccaagtgctgtacacactttattgcatttcatccttacagcagcctgcaaagcacagattgttatgcccacttcagaggtgatgaaatgtgagttccaggggtgaagacactcaccgaaggtcatacagaaatgaaggagcacagttggatttgaactccagactgtctgactcaaccccctgttcttttttctttcttttttttttcttttgagacagagtctcgctctgtctcccaggcaagatcttggctgtacagtggcaagatcttggctcactgtaacctccacctcctgggttcaagcaagcacatccagcttatttttgtatttttagtagagacaccgctttagccaggctggtctcgaactcctgacctcaagtggtccacctgcctaggcctcccaaagtgctaggattgcagatatgaaccactatgcctggtcctccctgttcttttcactgtacccaagctgcctcccagaggaaggaggaggtaggggaatggaaggcaggaggaggcaggggaatggaagctgagcctcaagccatacgggaagccatgagagccaatgctgaggccaggctcaggcagaatgacagcttgagaccatgactttgacagctgtgccgaggttggcctgaaagcaagtggctggggaagacgagctgtgattgtcaagacaagagatagccaggggcttcagcagggcgctgaggaggtgctgggccccgaacagaatgtccttgagccccgaacccaacagaacaagctccctacttacttgctctgtgaccttagcaagtcactcaatcatctcagttgggcgtcctcacttgtcacacagagtcaccacacatgctgagttgccaagggatgacatgagacaatgcaaggagacagaactgggtcaagtccaggtgaggactcaattaccaattaatctatgatctgaggcaagtcacttcacctctctaagcctcagtctccctacctagcaaatgggcacagctcctgtcacaccagtttgctgtgaagatgtagtgattaaagtatgggctctggagtaggtttccctgggttcaaatcatgttccaccaccttaagttgcttggttcttttctttctttctctttctttctttctttctttctttctttctttctttctttctttctttctttctttcttcttttctttttctttcttttctttctttctttctttctttctttccttccttccttccttcttccttccttccttcctccctccctccttctctctttctttctttcccctctctctctttctttctttttttcagacagagtctccctctgtctcccaggcaggagtgcagtggcgcaatttcagctcattgcaacctccacctcctgggttcaaaggtgattctcctgcctcagcctcccatgtagctgggattacaggctctcgccactgcgctcagctgattttttgtattttttttttttttgtagagatgggttttcgccatgttggccgggctggtctcgaactcctgacctcaattgatcctcccacctcggcctctcaaagtgctgggattataggtgtgagccatcaatcccggcagttctttttttttaagccccttcctgtctaggaattgctaggtttttctgtaccttggtttcctcccctggaaagtggagggtgaagataagcacacttacttcatggagatgtgatattaaatgatctcctcaccaggaagaacgcagaatggcgtctggcacaggtgagctctctgtcactgaaatcatgagccctgggtctagcacctaatagtaactaatgcttgctgcttgatgggcaccactttggacactttacgctttgactgtaatcctcaaagcagtcctatgagctaggtaatatgactgtccccattttatccatgaggagctgagttattctgatgtccaatgacttgccagaggtcacacagcagtcaggtcccagaccaggatttgagctctggcagactctgttatttattcatccctaatgaagtcttcacaaatggtgcaattaggacgtctacgttatgtatgaacgtgttttggaaccagaagagatgtaagtggagaatgccttcaaggagccctaaaggctgggcgaggagggtggggtgaaaggatggagggaccactctgttcagctcccgtttgctgccagcagggggcacccgctgcctccaccaggtctcccagacctgaaccaggaggccgggctggagacctgtccagtggcccatccaggcggaccttggggaccacgcgcaggggctgcagagagtggcggtgttagcccgtgcaaagccaggggcatgccaagagaggtttatctccccaagcgggctgcggagctgcctcaaacagaccttccaaaagatgcagatgcttcagcctcatctggcccctcctcccagcagaaccttctgggtggccaggcgccatggctcaggcctctaatcccaacactttgggaggccaggagttcgagaccagcctgggcaacacagggagacccccccccccccgtctctaaaaaaaagttaaaaaaaattgccgagtatggtgacgcgtgcctgtagtcccaactactccggaggctgaggtgggaggattgcttgagcctaggaggtcgaggctgcagtgagctgtgatcgtgccattgcacgatccagccaggtgacaaaatgagacaatgcctcaaaaacaaaaaaatacatatatatatatgtatatgggctgggcacacgtggctcacgactgtaatcccagcactttgggaggccgaggagggcagatcacttgaggtcaggagttcgagaccagcctggctaacatgattatctgttccttgtgtaccctccagaaatgttttttgtttgttttttgagacagagtcttattctgtcacccaggctggagtgcagtggtgcagtctcggctcactgcagcctctgcctcctgggttcgagggattctcgtgcctcagcctccctagtagctgggattacaggcatgtgccaccacgcccggttaatttttgtattttttagaagtgatggggtttcactgtgttgcccaagctggtctcaaaatcctagcctcaaatgaaccacccttctcagcctcccaaagtgctgggattacaggggtgagccaccacacctggcctagaaatgttttaggaatacacacaactaattttgattaccactactttgaaaacattttgatcaccacaaaagaaaaccttgtatcaattaagcaatctatctttatttcccctcacaccagggtcatttattttgttttgttggcctttttttttttttttgagatggtgtctcactctgtcacctaggctggaatgccatgatgccatctcagctcactgcaacctacacctcccagatttaagcgcttctctcacctcagcctcccgagtagctgggattataggcacccaccatcaaacctggcaaatttttgtattttgagtacagacagggtttcatgatgtttgccaggctgatcttgatctcctgacctcaggtgatctgcctgcctcagcctcccaaagttctgggattacagacgtgagccaccgtgcccggccaaccatttgtttttatggagctaaatttattgattttttttttttttttgagacagagatcttgctctgtcactcaggctggagtgcagtgttgtgatcatagctcactgcagcctcgaactcctgggctcatgctatcctcctgcctcagcctcctgagtagctaggactacaggtgcacaccaccacaaccagtttattgatctttttcataatggcccgaagattttgtgccgtgcatgggaatgcttttctcacttgattattaaaaggcaaaggaggccaggcatggtggctcatgcctgtaatctcagcactttgggaggctgaagtgggtggatcacttgaggtcaggagttcgagaccagcctgaccacatggtgaaatctcatctctactaaaaatacaaaatagccaggcatggtggcacacgcctgttatcccagttactcgagaggctgaagcaggagaatcatttgatcccaggagacggagtttgcagtgagctgagatcatgccactgcactccagcctgggcaacagagtgagactctgtctcaaaaaaaagcaatggatttgcaaattattattaatggtcagtgaaattttaaaacctgggaaccactgttgtagatcaccctccctagaataggagttcctggaagtgtagggacctcccatttgtccccatctatagcccccagaacaaagttggatagtgagtaagtatgcagtaaatggtggttaaaggcagtttctacctccagattataaaaggaaaacatctcatattctcttctagtccttttagggtgtgtttttttaaattatgttttttatccatctggggtttattttagtgatgagaatgaggtagagatacagctttttttccaagtggctagccagttgaaccaacaccatattgaataatctatcttccccctactgatttgaaatgccacctttagcatatactcaattcccacatgtatttgggtctatttctggactccctatcctgtcctggtgatggctctgtctgggattctatatttttttgaagctccccaggtgattctgatgcagccagtctgcagatggtgcttatctatgatgagatatttttgtggattcttagcaatgaaggaaaaaagagtatcacaaacttaaatttctttctgagggtccttcttttattttgtgattatgtacttactatacttttgattttaagatttttaaataaattaacattgatagtagattagtagatggtcattctggcttatttatttccaagtactttttttttttttttttttgagacagagttttgctcttgttgcccagtctggagtgcaatggcatgatctcagctcaccgcaacctccgcctcccggattcaagtgattctcctgcctcagcctcccgaatagctgggattacatgcacatgccaccacacacagctcattttgtatttttagtagagacagggtttctccatgttggtcaggctggtctcgaactcctgacctcaggtgatctgcctgcctctgtctcctaaaatgctgggattacagtcgtgatagaattgtatacttaaaataggtgagtcttgtaggcgtgagccactgcacccggccttctaagtacatttttaaaggagtataacatagagaacatagagaaatgtgcacaaactgtaagtgtacagcttgatgaattctcactaattgtacacacctgtattagtatcatacggctgctatcatagattaacacaaacctcgtggcttaaaagagcagaaatgtattatcctacagtttggaggccaaaagtccaaaatcaaggtgttggcagctctagaggagaatccttccttgactcttccagcttctagtagctccaggagttccttggcttgtggcagcatcacaccagcctctctgcctccatggccttcttctcttcatctctgtttcaaatctccttcagcctttctctctctctctctcttttttttttttttttttttttgttgttgagactgagtcttgctctgttgccaaggctggagtgcagtggcacgatctccactcactgcaacctctgcctcctgggtttaagcgattctcttgcctcagcttcccgagtagctgcgattacaggcctgcaccaccacacccggctaatttttgtatttttggtagaaacggggtttcaccatgctggccaggctggtctcgaactcctgacctcaggtggtccacctgccttggccttccaaagtgctgggattacaggcacgagccatcttgcctggccagcttttatcttataaggacagccagtcattggatttatggcccacactaatccagaatgatctcatctcaagatctttaattccatctgcaaagacccttttttccaaataaggtcacattcaggggttctaggctaatatatcttattactgatggggagcacaattcaacccatgacatcacccatgccaccaacaatcccatatcaagaagtaggatgggccaggcgcggtggctcatgtctgtaatcccagcactttgggaggctgaggcaggaggatcgcttgaacccaggagtatgaggttgcagggagctctgatcaagccattacactccaacctgggagacagtgagaccctgtctcaaaaaaaaaaaaaaaaaagaaaagaaaggaaaataaataggatatcatacaatgccagaagactcctccatactttgcctggcagtggagtgaccactatcttatcttaattttcttcttcttctgtttttttttttttttttttttttttttgaggcagggactcagcctagcccagtctggagtgcagtggtgcaatcacagttcactgtaacctcaagctgggctcaagtgatcctcccatctcagtctcctgagtagctgagactacacagacacacacgaccaagcccagtgaattttttgactgtggagacgaggtctcattatgtcacccaggctggtcttgaacccctggactcaaacaatcttcccgctgtggcttcccaaagtgctgggattacaggtatgggccactgcacctggcccaactttttattttgaaaaattctcaaaccttcacagaagttgcaggagtagtacaatgaccttcactcataaccttcatctagactcaccagttgttaatatatttctatatttataatacttcctcttctctctctctatttatttatatttatacatgtaatactttttttttctgaaccacaagggagttagttgcacacatcttcacatttcacccttaaacctccaaagaataagggcagtttcttacataaccacagtacaattatccaacatataatctacattcaaatttctcagccgggcatggtggctgacgcctgtgaccccagcactttgggaggcggaggtaggcggatcacctgaggtcaggaggttgagatcagcctggtcaacgtggtgaaaccccatctctactaaaaatacaaaaattagcggagcgtggtggtgcatgcttgtagtcccagctacttaggatgctgaggcaggagactgcttgaatctgggaggtggaggttgccaagatcgcgccactgcattccagcctgggcaacagagtgagactctgtctcaaaaaacaaacgaacaaaccaaaaaataaaaaaaccccacaaatgtctccagttgtcccacagacatcccttaatgtgggcaatttaaaacattaaaaacccagggtccaatcaagaaattcacattacttttagtgttcatgttctctttcttgtggtcattatttgactgatttatttatttatttatttgacagtctcaccctgttgcccaggctggagtgcagtggtgtcatcttggctcactgcaacctccacctcccaggttcaaatgattctcctccttcaacctctcgagtagctgagactacaggcacacgccaccatgcccggctcatttttgtatttctagtagagacagagtttcgctgtgttggtcagctggtcttgaactcctgacctcaggtgatctgcctgcctcggcctcccaaagtgttgggattacaggtgtgagccaccgctcctggctgagatccagtttcttaaataggttctggggctttagaagttggaggactagctgggcacggtggctcgtgcctataatcccagataattgggaggctgaggtgggaggatcacttgaacggagacgttcgagtacagcctgggcaacaaagtgagacctcctgtctttctatttaaaaaaaaaaggaagaaggaaggaaggaaggaaaaagaaaggagaggagaggagaggagaggggaggagaggagaggcgaggggaggggaggggaggggagaggagaggaggaaattagaggacccctgagtcaggggaagctactctagtctctaaggtcagcctgagtggggttttggggtgctttgcagggaagagaggaacctcgcctgctctcttcgcaggctccaggtctgctctgagcccacatctgcccgaaggcatgcccgctggggtgttccttgctgagcgagtgaggcaatccctgcaagggaggtgtggtggttctggcgtgagcctgaaccttggggcaagagggaaggacaatgtacttctcagccattgcagggtgtgtgtaacctgccctgccagtgggtgactcaggctgaaaccagacccagcattcaccctgtctaagcctagttggttagtgtctggagtgctgtcaattgctttacatttgcccttcagggaaatgcttttgcactgacaggcggggcccagattggaggttgtcaaatctgcaaagccctactcctccatttccacatggcagactcctattcacactccaaaacccggcccaggtagtgctcctgctgaaccctttcctgacctctgacccctcccccatggagtgaataatgttgtcttccaatatgcactctggagccagactgcctgggtgtgaatcccttctctgccacttactagctgtgtaatcttggtcaagttacttaacttctctgtacttctacatctgcggaatgggaaaaattatagcacccatttcactgggtagttgtgggggttaaatgagttattatacataaatacttaggacagtgcttggcacacaatatgagctcaaaaagagctgactagtattactcttattattattattatttagacagagtcttgctctgttgcccaggctggagtacagtggcttgatcttggctcactgtaacctctgcgtcccaggttcaagcagttctcgtgcctcagcctcctgggtaactaggattacaggcgagtgccaccacaccccactaattttttttttttttaggttttttttttttgtatttttagtagagacggggtatttttttttttttttttagatggagttttcgctcttttcacccaggctggagtgcaatggcgcaatcttggctcaccgcaacctccgcctcctgagttcaagcgattctcctgcctcagcctcccgagtaactgggattacaggcatgtgcctccacgcccggctaattttgtatttttagtagagatggggtttctccatgttggtcaggctggtctcggactcctgacctcaggtgatccgcccgcctcggcctcccaaagtgctaggattacaggcgtgagccaccgcgcccagctgagatggggtattttgtatttttagtagagatgggggtttcaccatgttggccaggctggtcttgaattcctggcctcaagtgatcctctcaccttggcctcccaaaatattgggattacaggtgtaagccactgcgtccggccactcttatgtttgtatttaagaaatacctaaggctgagcgtggtggctcatgcctgaagtctcagctactccagaggctgaggcaggaggattgcttcagcctaggagtttaaggttacaatgagacatgatcgtgccactgcactccagcctgggcaatagagcaggatcctgtctgtcaaagaaagagaagaaatacctgagaatatagtgaacacagcacataagtttcctgcacccatgatatgttctcagcctgtgtggacagatagacaaataaacaggaaattcactctgaatgatgaaaaatgtctcagtaagggaagtggtgggctgaggggagtcatgggagcacagaaaaagcccccttcccaggttggggtggtcagcagcattttcctggaataaatgacaactcagctgaaatataaaagatgaataagatttagccaggcaaagagggagggcagagaggggaagcgtgggaagggtttgaggcaggagggatggatagtgcaaaggctcagaagccagagttcttgatgtatttcaagaaccgaagctcaggatggagcgtggatcccggagcgtgggtgggtgggtgcccttggcatatacaccagttattcactgtgtctctttgtgatctgtcttccttcctagtgtgtgagctcctgcaggacaaagctcacatctccttgaattccctgcgcccagcacccagctcagcactcagcagggattcaataaatgtttgctgaatggaaatgagaaatttgagaacccatcagggagccatcttgggcaaccttttcatttgcttaacctgtgaatttggaattcttgttagccttgggctattcttaatagccaagtttatttgtttgttcagaattgtcatctgctgtgcgtctcagactcctctgaatgaggtggttctgtccgggcaaagtcaagtttctggcccaacaaggtgaaacctgatcctttgagtccctctctggatgccattctgtaaactttctttcttaccatctgtaaactttctttctttctttctttccttccttccttccttccttccttccttccttccttccttccttccctccttccttccttcctttctttctttctttctttttgagacagtctcactctgtcacccagactggagtgcaatggcgcgatcttggctcactgcaacctccacctcctgggttcaagcgattctcctgtctcagcctcccgagtagttgggattacaggtgcacactaccatgcctgcctaatttttgtgtttttattagagacggggtttcaccatgttggccaggctggttttgaactcttgacctcaggtgatccacccacctcggcctcccaaagtgctgggattacaggtgtgagccaccgcgcccagcaattttttttttttttttttttttttttgagatgaagtcttgctctgtcgcccaggctggagagcagtggcgccatctaggctcactgcaacctctgcctcccaggttcaagtgattctcctgcctcagcctccccagtagctggtattacaagcgcccgccaccacgcccagctaatttgtgtgtgtgtgtgtatttttagtagagatggggtttcaccatgttggccaggctggtctcgacctcagatggtcagcctgcctcggcctcccaaagtgctaggattacaggcatgagccaccgcacctggccaaactttcttttttttttgagacaagggctcgctctgtcgcccaggctggagtgcagtcgtgtgatcacggttcgctgcagcctcgacctcctaggctcaagttatcctcccacctcagcctcctgagtagctaggaccacaggtgcatgccaccacatgtggctaattttttttactgttgtggagaaaggaggagggagaggggagtctcattatcttgcccaggctagtcttaaactcctggactcaagcaggcctctcaccttggcctcccaaagtgctgggattacaggcatgagccatcatgcctggtcatctgtaaactttcaaactttgccttgtatcaggtcacctggggatcttatgcaggtgaggcagattctgattcagtatgtctgtggtctggcccgagattctgcatttctgactggctcccaggtgatgccaatgctgccggtccgtggattacactttgagtagcaagccgttagacaacattcacatctttcctggccctcactgcaatgacgactttaaaagcaggttggagtcaggctcagcagggccttggatgccaggctaaggagttcagcatttattctggaggcaataaggagctggatgctgggtgctagaggggctgagctattgcaaaaacaggagagagaggtggcaaggctgaagctcaggcagaggcagtgggaatgcagaggatggtggtgtcctgggctgaactgtgttcccctcaaaaaattcagtgttgaaaccttaacccctagcacttcagaaggtgactgtatttggagatagggtatttaaagaggtaattaagttaaaatgaggtcatgggaatgggccttaatccaatatgactggcgtccttaagaagaggaaattaggacacagacatgcacagaggggagaccatgcgaagacaaggaaagtagacggccatctacagacccaggaaggggggctcagaagaaaccagccctgccagcaccttgatctaggacttctgcctccagaactatgagaaaatacatttctgttgtttaagccacccatctatgggactttgttatggcagcccatgcaagcaaataaatacagaggggctggattaaagaggactgtccaggttgtcagttacttgaatgtcattgtggggggctatcggatgccatacaggtgatttggaaattgggaaggcctgggaatgaataggaagctggaggaggggcccagagggaggagcagggctggggaggactggatttggaccaggttacattggaggtgccactgggacctcggcaggtgctacccagggggctttaggaaatgaggccagtggtgctttccgttaaagccaggcactcagggagtgaggagaaggaagagaatggtcctgtattagtgggggccctgggttttaaataagcaaaactggctcaggctaacttaagcaaaaaggaatgtactaaacagatttctggaggctcacagcagcgatgtgaaggctcaaggccaagcttggaaggtgagctggtgtcgagggagactggcccacagtgggcacgatcaggaacgcgtagcagggtcagcctggactgaccctggaggaccctcaggactgctgggctctgctcatacatcaatccagcagtctcctaagattcagagatctggggggagcatcctatggcccaaacccagtcacatgtctgcatccctgatgcccgggggaggtttccagtgggaggatacctctccatccctggaagattaaagatggctgcatgctctgtgatactcctttcatatcacaggagatagagaattgggctctatcttcctctcctggcctgtgactgctttggccaatagaatacagtggatgtgacactatgccagcttcaggcccagactttaagggaagtggcagcttctgccttggtctctgggagccctgagtcactcactccgtaagaagactgactggagagaccacatggagattacgtggggaagggagaagggcacactacagcccagccttccagctagctctgccaagaccccagtgttttatatacatatttttcttttttattttagagatggtggtcttgctatgttgcccaggctggtctcaaactcctgggctcaaacaatcctcccacctcgccctcccaaagtgctgggatcacaggcatgagtcaccgcaccggctgacccccatgttttaaattgtacctgggattttgtttttattcaggtatggcgaggccaacagatcaggagatgattgtcattgaaagacagttggttaaccacagttctcaagaggagggggcatgccatgtcacacagggccacatggggaagtaccagcatcagtcaggaggcagaaggaggaagggggaagtgtgggccagagtcttcattgtgattttggtgggaaggaataggcaaggcagggtagacaagctggatgggtttaggactggctagcttgaacaattcccttgggttctgggctataggggtggtccctagttgtctagtacctaagcaggatgatctagaatgggggatagcatcctgaactgcaggagctgataaaaggaggtaggaggtggatgggggttatggaatcaagattggttggtttgcacattaagaggtgctcccaggcaagattgccatctctaggaattagctatccctaggaggggcagtcccttttcgggtccataaggcccctggatgtcaaagcatcataaaatacagaaaagaaaaaacacgattaataggccaggcgtggtggctcacacctgcaatcccagcacttttggaggctgaggcaggagtatcacttgagcccaggagtttgacacaaacctgagcaacacagtgagactccatctctgccaaaaacaaacaaaaaatttgctgggtgtggtggcgcatgcctgtagtagcagctactcaggaggctggggcgggaggatcacttaagcccaggagttaggggctgccatgagctatgttcgtgccactgcactccagcctgggagaaaaagtgagactctgactcaaaaaataaaaaataaaaacatgatgaatccatccaggaatgggagtaaaacaccttggactttccagtccacactgagccaccagctgactccctcagctgaggcctcaggcatcatagagcagaaggagcagccctgctgtgttctgtccaaatttctgacccacagaatagtgagatacagtcacaataaattgtttcagagcctttaaatttcgaggccgtttgtcatgcaggtgtagatttctggagcccctccaccctccaagactcactcattagcagattccttcccaatctcagaagggacttgggaaagataattccatgattggttaaagacatgactcccatgaccatataatcagcttaattttaactcccattacaaagatgaagaaactgaggttcagggagggaaagtcatttacccaaggtcacacagtgcaaattcaaatccaggtatgccagattccagcatccagccccttccactgtaccagctgtcacctagttggcctctttatggagcccatggttggagctgagagagccttatggatggtctccaaaccaggccccccatgaatctcacccgccccctctccatgtgctccccgtgttttcccattggagaaatcccgcatcgcctctcatcaggagctgggctggaactgctacttccagaccctgggaagcttcgagtgcttcccttccgctggccttccttgcatccatgcagagactgtgccatcttccctgcatcccagcacccccggcttcaggtgtatcaaagtcccagcgctgcgtgaagttcaggtttgaacacatctcagcaggctttgtgaatacattagtttttgttttcccctaacatgccacaggggtgggaggaatgggagggggcactggaatttaatatgcaaatgtatgcagatcgcatctaaatgagggtgtcccaggtttaatgggaagaacaggcaatcagagcaggcccagcccagcctgcagccctggggctctgcagcagcacagtcagaaatgactctccggggagggtgtcttgggctcttttacagagcgtgttctttgaagcaatgtctccgcagcacaggggaaggaagagctgcggaaattggttctggatacttcctggcaaagtgttctcaattgcttcaactatgttgggggtgggtgggagagagggggtagaatctctgaacctctcagtgaacacagccagcagcggctgtccctatcagtgatttctaaaccgaaggagcttgctaacatctacttccagatcacactgattactaaaccagaatctcttgagaacctttgttttttaaaagtccctggctttaggaaatactgacactaaccaggcgttcttaatctggagactcttacaggttccggggcccggtatagcaatgttattaacccttcctgcatattagaatcaccgaggcttaaaaaatttcccaacgctcaggctgtaccctagaccaattaagtcagaatctacaggaggggaggtgaaagtcaggcatcagtattcaagagaaaatcctgagtgattccaatgtgcaatcaaatttgagaagcattgctgaacaggattcccacgagacacttgttatacctgtgcttgctttggggctattgttagctgcaggcccaccacccggtgccagcttcaggagaccctccttctaggaaggggactggaggattggtgtgcagccagtatgcactggtatagcagcattggttgtaaaaatactgaaatatggctgggtgcggtggctcatgcctgtaatcccagtactttgggaagccgaggcagatggatcccttgagctcaagattttgagaccagcctgggcaacatggtaaacccatctctataaaaattgcaaaaactagccaggcgtggtggagcgtgcctgtggtcccaactacttgggaggatcgcctgagcctgggaggcacaggttgcagtgagccgtgattgtgccactgcactccagcttgggcaacagagcaagaccctgtctcaaaaataaaatactgacatatttccccatccacttgtaactggggctgctttgaactttctaagttcaaagcatcaccctccccatctccccagaccctggacataatcagttctgattagttagggctcctgaggacctggttgttaaatacttgaacatcaccccccgctataatgttgtagtgagaagcacccactttatatagtcagaaaggcctagattcccacttgattttggtatgagttgtgtggcttttggacaagtggcttcatctctctgaaggtcagtttcctcatctggaaatggggtcaaatgccctccctatcagcgtagggatgaagctgcactacagcagaggtggcaaactgagcatgcatcagaatcacttggctgggctgggcacagtagctcatgcttgtaattccagcactttgggaggccaaggccagtgtatcacctgaggtcaggagttcgagaccagactggccaacatagtgagaccctgtctctactgaaaatacaaaaattagccagacatggccacaagcacctgtagtcccagttgctcaaaaggctgaagcaggagaattgcttgaacctgggaggtggaggttgcagtgagctgagatcatgccactgccctccagcccgggtgacagaacaagactctgtctcaaaaaaaaaaaaaaaaaaaaaagggccaggtgtggtggctcacgcctgtaatcccaacactttgggaggctgaggcgggcagatcacgaggtcaggagttcaagaccagcctggccaatatggtgaaaccccgtctctactaaaaaatacaaaaattagccgggcatggtggcgggcccctgtagtcccagctactcaagaggctgaggcagaagaatcgcttgaacccgggaggtggaggttgcagtgagtcgagatcgtgccactgcactccagcctgggagacagagtgagactctgtgtcaaaaacaaacaaacaaacaaacaaaaactttggcttgttaggtcaaagatttctgggccccaccccggagttgctgattcaatcattctggggcggggaggatttgtgtttctaagttctcaggtgctgcaggggcttctggtcctgggactacagtttgagaaccattgaactggaagatgtatgagaaagtgggctgggccgagagtagaggctcaacccaggcttggaaaagggtcaaaatatgtgccggtttccctgtgcgccacatggacttctccctcctgagccattccccagggctctctccatccatttgtccagcagggactgagcccccgctgaatgcttaaccttggatttctcaaagattaagtcctcttcccacctcttccccattgtgagcaggaccagatttacacctttagtggctgtgattactgaaaatacggtgcccctcccatctgttgtccaaagtaaaacaacactaaaccctgaaatgacttcataaaaagaacaatagagaactgatttttttttcccaagctggctactttgaggattttttccaaatatcaaaaacaatattttattttatttatttattttgagacacagtctccggagtctcgctctgtcgcccaggttggagtgcagtagcgcgatctcagctcaccgcaacctctgcctcctgggttcaagtgattctcctgcctcagtctcctgagtagctgggattacaggcatgcaccaccatgcccagcttatttttgtgtttttagtagagacggggtttcaccatgttggccaggctggtcttcaactcccgatcataggtgatccaactgcctctgcctcctaaagtgctgggattacaggtgtgagccaccgcacccggtcaaaatcaatattttaaatgtgtattttgggactgcgcctgctttgctgggaccccaagcatattcttacctgccagtgggcaacccagtgtcaaaggaaccggtcccaggcccattctctttcacctccattttcacatctctccctgcacagcaccatcccttcttgtagacaagaacttctcaccttaaataaaactccacttgaggctgggcacggtggcttacgcatgtaatctcagcacttcgggaggccgaggcgggtggactgcttgaggccaggagtttaagactagcctgggcaacgtggcgaaaccctgtctctacaaaaaaacaaaaattagctgagcttgatggagcacacctgtagtcccagatactcagaaggctgaggtcgaaggatggcttgaacccagaggcggaggctgcagtgagcctagatcacatcattgcactccagcctgggtgacagagtgagaccctgactcaaaaaaaaaaccccaaaaaacaaaaaaacctccacttgactgttctctgccctaccagctacctcactcttattttccttttttatctccaacttttctttcctacagatttcagccaaataactcacatctgttccctctgttggttcctaaacataactcctccagcctggcttctgggcaatcacccctccctgcccctagactgctgcccccatggacttcctttttgcgagagccagtgacctgatcttagcacgggattgggagtcagaaggcctaggcagctggtcactcaccagctgtgtgaccgtgagcaacttaaagcacttctctgagccatgggtatgaacgttaatttgcaaagttgagatgagagcattagagtaatagaatcataatagctaaactgtgtgtgtgtgtgtgtgtgtacctgctaagagccaggcactgtgctgagaatttgccatgtataatcacatttaatccccactacaacacctccaaatgaggtctgcttctttccccactttacaaatgagaaaagggaggcacagagaggtaaagtgatttgcctaaagtcccacagcccataaatgataggtagtagaatatgaacccaggaggtctgattccaaaatttatgccctatggcttccttactgacggtgctcagtacagataagtgggaggtgtgacttggtgttaatagggactctaagagtcagtgtgggaattgccattcccctgaagctagggatggcaggtgtgtttgtgggttgggggtggggtacttgagtgatgctctcccctgaggcaatgtcttgcaggatacacacctttctacttcatctcagatttcagtgtctcctccacatcctgccagagcctctctggcctggctgcccctcccctctctggcaggtttgggagaaagaggcttggagttcccccatcctagatagcgggacagattcctcatctcgtgaggctgaccctgatctgggggcctgttattaataatggcctgcagggctgtgtcatccagctagtgattcaggactccagggtcagcaccctccccatcctgatggagctacctcagtgaggggcttagagtctaagctatgactctacgtgagggtatatgctgttctctgcctgcactcccagggtcttggctaaactctattgtggtattaaaaagagaggctgggggaagtggggaaggggatgtggtaaccagaaccacttcctgccactgcagtgttgaaagccaagctctgtccaagttccccttgatgggggttggggagccaggaggtaaaggaggaagttgatgggagttgggggggatgttaaaaaaaggaggattcttatttggattgactccaggaatcaagatctgggtttcctggctgctctctccctgctcccatttggtaaaaaacagcggctgtcctgaaggtggtcctaattagcatagcagtgaacacttattatcatgtgccaggcactttatatttgctaacactttgagccttacaaccaccccatgaaggaagcactattattactccaattttacagatggggaaactgaggcactgaaatgttgtgtcagttgcccttgtcacacagcaagtcagtggcagagctgagatttgaacttaggcagcctggctccagagtgcaggctcttgctctgtgaccactctgagcctcagtttcctcattgcatgatgagggtaattggaatacataaatccactttcctttcttgatgcctgattctctggtaattaattattcattcaatttctccccatgctgaactctcagatccatgaacaatgagacaaaggctatcttggtcactacttgtattcccaattcttagcataatgattggcctagaaaaactcaactagaatgtgttgagtaaatggtctttaaaaggtctgaagatcatcaacaatggtttgagtatctgataaaagttttagaccctttacatagaaaaatcaacatataccagtagctgggggtgagtctgcccctcccactcacccagggtacatttggcaatgtttggtaacatttctggttgtcacaactggcagggggaggtgctactggcatccagtgggtaggggtcagggacgctgctaaacatcctacaatgcacacgacagccccaagtgccaatagtgctaagtttgagctatgtgacatacatacatagatatgtattgtatgtcatgtttggtaccattgatggcaagtggggggtagttaacggattttcctaaaagcccgtgtctgccacccagatgaagatcctccagattggaagatctgttcctctaaactcatattactctatgacctcacattcccgagtctagaatctagttcctcctgggtcccctgtcctagcctctgattccctaaatgcctgggcctcctctcttaccttcagtgggtagcaggggaccagaggagaagcatccaggttttatgtgctgcccctgtcaccgcatccacctacccacttctatacctgggtcatcacagttccctgtaaatggtaataaagatgaaaagcttcagagccaggcagttctgggcttgaacactagttctgtggattaactcgctctgtgatcacaggcaaattccttaactctctgagccttagtttccccctctgaaaacaggagggatactcattaaacttaccttacaggtggtgaggatgaaacgagaggcttatagagaacttattacggtgcttgacacagtaaatctcaaaaaatgcattattattattatggttcagaggtaaagtgacttgcccaaggtcacatagctggaaaatggcagagccgggatggaaatccaggacttcgtgactgcaaagcagatgttcattggttagtgaactttagaacttcaacttttctgtaaaggaagttaattatctccatctcacagtctcatttattagataagcatataaaatgcctggcacatagtaggccctttaaatacagcttattgggccgggcgccatggctcatgcccgtaatcctagcactttgggaggccaggtgggcagatcacttgagtcagaagttcgaaaccagcctggtcaacgtagtgaaaccccatctctactaaaaatacaaaaaatttagccaggcgtggtggcgcacgcctataataccagctactcgggaggctgaggcaggagaattgcttgaacccgggaggcagatgttgcagtgagccgagatcacgccactgcactccagcctgggtgacagagtgatactacaccccccaaaaataaaataaaataaataaatacaactttttgagttgttagcaggtttttcccaaatagggctttgaagaaggtgaatatagaccctgcccgatgccggctggctaggaagaaaggagtgagggaggctgctggtgtgggaggcttgggagggaggcttggcataagtgtgataattggggctggagatttggctgcatggagcagggctggagaactgaaagggctcctatagattattttcccccatatcctgccccaatttgcagttgaagaatcctaagctgacaaaggggaaggcatttactccaggttacactgcagcttagagcccaataacctggtttggtgattccaagttagaatcatggtcttttggcagggtctcgctctgttgcccaggctggagtgcagtgacataatcatggctcactgtatccttgaccttctttctgggctcaagcaatcctcccacctcggcctcccaaagtgctaagattacaggaatgagccaccatacctggccctgaatcttgggtcttggccttagtaattaaaaccaatcaccaccatccgttgcggacttacaacctacagtgttctaaacattttatatgtttgatctcatttaatcctcacatcaatttagggacaaagagccccccaccccccgtttttttttttacagctgaggaaacacttcaaagtggtaagacatttgcccgaggtcctgaaggaagagagtaaagccatgtctgctgttttctagaggctgctactgtcccctttactgccctgaagattcagcctgcggaagacagggggttgccccagtggaattccccagccttgcctagcagagcccattccttccgcccccagatgaagcagggagaggaagctgagtcaaagaaggctgtcagggagggaaaaagaggacagagcctggagtgtggggaggggtttggggaggatatctgacctgggagggggtgttgcaaaaggccaaggatgggccagggggatcattagtttcagaaagaagtctcagggagtcttccatcactttcccttggctgaccactggaggctttcagaccaagggatgggggatccctccagcttcatccccctccctccctttcatacagttcccacaagctctgcagtttgcaaaaccctacccctcccctgagggcctgcggtttcctgcgggtctggggtcttgcctgacttggcagtggagactgcgggcagtggagagaggaggaggtggtgtaagccctttctcatgctggtgctgccacacacacacacacacacacacacacacacacacacacacacacaccctgacccctgagtcagcacttgcctgtcaaggaggggtggggtcacaggagcgcctccttaaagcccccacaacagcagctgcagtcagacacctctgccctcaccatgagcctctggcagcccctggtcctggtgctcctggtgctgggctgctgctttgctgcccccagacagcgccagtccacccttgtgctcttccctggagacctgagaaccaatctcaccgacaggcagctggcagaggtgggcaaacacctagtctagagttggggagggctgtccgtgagggtgttgagtgtcccagagaggatgcagggcctcagaggagatgctttaggggtgtgttggtggtgatgggcgtatctgaagaacagaggtgtccagggttaggcagtggggggtcttgtggaggctttgagcagtgatggccagaaatgggcaatggggctttcctaggtgggaaatgggaaatggtttggggtgggggaggcattggagggttctggggtaagcataggctgggagtgaacaggggcaaaccttatgcagctgtggggtagaaatgggctagaggcatccaggggtgagaaggagctgaggatgtctaaggaggggagatccctgggtggtcagaaagcactggtgtctggaaagcatttaatgctttattaaatgttagtccctgctgggcatgacggctcacacttgtaatcccagcactttgggaggctgaggtggtaggatcgctgaagctcaggagtttgagcccagcctaggcaacatagtaagatcctgtctctacaaaaaaattaaagaaatagccaggcacagtgatgtgcacctgtagttccagctatgcagaaggctgagatgggaggatcgcttgagtccaggaggtccaggctgcagtgggctgataccgtctctccgaaaaagaaaaagaaaaaagactccctccatgagtgtctggagggagtcctttggccccagctgggcagagaaaggggtcagagatctggcatgtgtgtgtcccttcatccacaggaatacctgtaccgctatggttacactcgggtggcagagatgcgtggagagtcgaaatctctggggcctgcgctgctgcttctccagaagcaactgtccctgcccgagaccggtgagctggatagcgccacgctgaaggccatgcgaaccccacggtgcggggtcccagacctgggcagattccaaacctttgagggcgacctcaagtggcaccaccacaacatcacctattggtgagccggggccgtgggggcagcggggtggggcggggaggccaggtctggctcttgggccagcggtgaacatgtcctgtcttggacgcgtccctgggtttcactatttaatgtgtggcccctggggagtgtccccacctctgagcctctgtttctccttcagggaaatggctcttgcaatccaagtcctcctgccagggccattgtgagggtctaagtagacaaaaaaaaaaaaaaaaaaaacagtctggaagcaatttatagatgagagcgtggacggcagagagcattgtgtatgttgaagtctctgcgatatggggtgtccctgctgccccgctccagcctttcacttctgacctccttcctctggctcttacgctacaggatccaaaactactcggaagacttgccgcgggcggtgattgacgacgcctttgcccgcgccttcgcactgtggagcgcggtgacgccgctcaccttcactcgcgtgtacagccgggacgcagacatcgtcatccagtttggtgtcgcgggtgagaacgtgaggagggaaaatccaagagacctgggcggggtcagggaagggaggaccacggagagcgtggaggcagcagtggccccggcttcctcttgcctgcccgcgctgccctggcttatacggcccctcctgccagacagtgcacagggccagggcgccaggctgggagagcttcgcgcaggcgggatttcagcccgcacttatttcggagcccttgccttgggcagcgcacaatctgcgcagcagtactcggctaaccctcttcctctcgacctgtttcttcagagcacggagacgggtatcccttcgacgggaaggacgggctcctggcacacgcctttcctcctggccccggcattcagggagacgcccatttcgacgatgacgagttgtggtccctgggcaagggcgtcggtgagattctgagtcctcctggcccctgattcccttcattctctcccactcatcacccgccgccctaactccggtcccccctcctcctgcagtggttccaactcggtttggaaacgcagatggcgcggcctgccacttccccttcatcttcgagggccgctcctactctgcctgcaccaccgacggtcgctccgacggcttgccctggtgcagtaccacggccaactacgacaccgacgaccggtttggcttctgccccagcgagagtgagtgagggggctcgccgagggctgggggcgcccaccacccttgatggtcctgggttctaattccagctctgccactagtgctgtgtggcctgcaattcaccctcccgcactctgggcccaattttctcatctgagaaatgatgagagatgggatgaactgcagaccatccatgggtcaaagaacaggacacacttgggggttataatgtgctgtctccgccttctccccctttcccacatcctcctcgccccaggactctacacccaggacggcaatgctgatgggaaaccctgccagtttccattcatcttccaaggccaatcctactccgcctgcaccacggacggtcgctccgacggctaccgctggtgcgccaccaccgccaactacgaccgggacaagctcttcggcttctgcccgacccgaggtacctccaccctgtctaccaggttcagccccgccctctcatcatgtattggcccccaaaacgcggctcttccctcccatcagtttgtctttccactctcattggtcctcaggacgaccgtgactccgcccacctacaccacatttccaccactatccctgacttccaatggccccgccccagccactaaggttcggccttttctgcccagctggccgcctcttccttggtctggtgtcccaggcaccgcccacgggtctagcctcttctcaggagtgctctacagcgccccctaggccaccaagattgtttagctccctgtcgggtcggcccctgactccttattggactcatccatctggctcatccaaggccttgggtctctccagctgactcgacggtgatggggggcaactcggcgggggagctgtgcgtcttccccttcactttcctgggtaaggagtactcgacctgtaccagcgagggccgcggagatgggcgcctctggtgcgctaccacctcgaactttgacagcgacaagaagtggggcttctgcccggaccaaggtaggcgtggtcccgcggctccggggctggggttcccggcagtggtggtggtggggtggccagggctgggggctcggcccggcgctcacgtctcaggctccctctccctccaggatacagtttgttcctcgtggcggcgcatgagttcggccacgcgctgggcttagatcattcctcagtgccggaggcgctcatgtaccctatgtaccgcttcactgaggggccccccttgcataaggacgacgtgaatggcatccggcacctctatggtgaggcaggggcagggatgggaggaggaggggaaagggcgtggctgtgccacagtaccaaagaattgggggttggggatcgggggaggaacggggcgtgcaggagaggtgggacctcaacgtctgtctggaagcagagcctgggcccagtcgctgccatgtcagtgcttagaggtggtgataaagagactctagagagagataggtgtgacttcaaaagccagtctactctgggcatggtggctcacgcctctaatcccagggctttgggagacccaaggcgggaggattgcttaagcccaggagttccagaccagcctcggcaacatagccagactcccatctctacaaaaaataaatgagcaaggcgtgaaggcacatgtctgtagtcctagctactctggaggctgaggtgggaggatctcttgagcccaggagttcgaggctgtagtgagctatgattgcaccactgcattccatcctgggccatagaggatgtcgcttaaaacgaaaaagaagaagaagaaagtcctgtggtttgggaagggaggctgagtgaggaggggcctgtgtgccagaggaggcttcactgagaagcttaggggagcagatgttctaggggtacagaggtatgcaggaataggaagagtctcaccccgtgtctctttttaggtcctcgccctgaacctgagccacggcctccaaccaccaccacaccgcagcccacggctcccccgacggtctgccccaccggaccccccactgtccacccctcagagcgccccacagctggccccacaggtcccccctcagctggccccacaggtccccccactgctggcccttctacggccactactgtgcctttgagtccggtggacgatgcctgcaacgtgaacatcttcgacgccatcgcggagattgggaaccagctgtatttgttcaaggatgggtgaggaggcggggttgtgtggatgcgggagggggctttgcggaggggctgcccgtcccttcccgcccactggccctgtgtccaaggcttagagcccgtcctttccctcctcgctttctcaggaagtactggcgattctctgagggcagggggagccggccgcagggccccttccttatcgccgacaagtggcccgcgctgccccgcaagctggactcggtctttgaggagcggctctccaagaagcttttcttcttctctggttagttacctactttccctcccccgcccggtcaatccccatcagtcaaggaggctcaagagaccatcgataacccacgaaacgtcttgtgcgttttagaaaaatacgccccctggcggacgcagtttagcaaacgtaggggcggctgagtttctgccccctcctctccacgccctcgcgtcgctctacccagcgcctctgcccctgggttgcagggactgcgggcacgcgggctaggaaaggcctcgccggaatctccctcctcgcgttctaggagtacgtgctccctctgcgcccccaaaccgacgtgaccctcctcccctgcagggcgccaggtgtgggtgtacacaggcgcgtcggtgctgggcccgaggcgtctggacaagctgggcctgggagccgacgtggcccaggtgaccggggccctccggagtggcagggggaagatgctgctgttcagcgggcggcgcctctggaggtgagcgccgccgcggccgccggcagggggagcccgggcgccgtcggtccgtccgctagccggctcagcacctgtctcctccgcgcctgcccgcaggttcgacgtgaaggcgcagatggtggatccccggagcgccagcgaggtggaccggatgttccccggggtgcctttggacacgcacgacgtcttccagtaccgaggtgagggctgaggaggatcccttcgtgagacaccacactaagctcctcttagtgagtggtcaaattctgagcgaggaagaaaaagcccttggaaatggaaacaaatgccccagcacagacaagatcccagcagaggcagaggccttctccaggtcatttaggaagtcagggatgcaaccaagaccaggacccagatttcctgcctccccggctggaagctctttctccttcagtacaggacggcaggtggtttgtatggaagctcagttattagacaacagtcatcaagtgccgataatgtgccaggcactgtgctacagggagagataagacaattcacagctctgtgactttgggcaagtcactgcttctctactcttcgagcctcagtttccccatctgtaatatggggactatagctggaattacacttgacttccctttcttaccagtcacatccaaacagttgacaaggtgaacaagatttcctgccaccaaaatctttttcgagtctgtcattttttttgccatcttctttataaacaccccagcccaaaccatactggctgtccaggacctttaacaaattccatgagattagagagggggtaggagtgaagggcaatggtcttgggagtgaccccagatgaattccaaggtcaaagaaattaagaggatctgacactccacccccgtgttctcatctcttcccactcctcctgttatttactctgctccacccacactggctgctctttgaacagatcaaggtcattcctagcttacagcctttgtgccagttgttccctctgtctggaaagcttcccctccagattgtcactgggccatcccactgtcttccttcaggtttcagtgctaaggccattgcttcaatgaggccttctttgatgcttattatctatttacttgtttttattttctccatagctttctatattttctttttttttcttttttctttttttttttttttgagatggagtcttgctctgtcgcccaggctggagtg[141 bp omitted]tttcaccatcttggccaggctggtcttgaactcctgacctcgtgatccacccgcctcagcctcccaaagtgctgggattacaggcatgagccaccgcacccagccgctttctatattttcaaaaccaatctcatttatttatgtgtttgcttaattgtctcttgcctcactagagtgtaagcaccaagataattgagatcatgcctgcattttttctgcttatccccagtatcttgaacaaagcacatagtagatgctcagtaaatgatgaatgaacagatttgttcaatgaatgagcgttgaatgaattgttctgagcattaagatagttggtctattcatttgttaattcattcacaaaatgtgtatggtgtacctactgtgtgctaggctctgtggcagtgctttgggcactgaggtctgtgccctccagcatctcacagaacctcacagcatctcacaggttggggggatggaggtgatatgtgaaaaccttagaaagttctagaaatggcagaagagatggttgtcaagatcttgttcctatttctgtatatgtgggagaattagaatcactcctcttatgcctgcctgtctcctgcagagaaagcctatttctgccaggaccgcttctactggcgcgtgagttcccggagtgagttgaaccaggtggaccaagtgggctacgtgacctatgacatcctgcagtgccctgaggactagggctcccgtcctgctttggcagtgccatgtaaatccccactgggaccaaccctggggaaggagccagtttgccggatacaaactggtattctgttctggaggaaagggaggagtggaggtgggctgggccctctcttctcacctttgttttttgttggagtgtttctaataaacttggattctctaacctttagaagcagactttatttatatatgtatgcacgtatgtatgcatgtatgtatttaactgatagagtgcaaaaaaaaaaaaaaaaaggaaaaacaaataactgatagagtgctttctacgtgccagaaagtgttctaggccgggcacggtagctcactcctagcactttgggaggccgaggcaggcggatcacgaggtcaggagattgagaccaccctggctaacacgatgaaaccctgtctctac[133 bp omitted]cactccagcctgggaggtggagcttgcagtgagccgagatcacgccactgcactccagcctgggtgactgagcaagactccgtctcaaaaaaaaaaaaaatagtgttctaggcactttgtaaatgttaacatattcaatcattcctgttaggaaagtatgatgtgattatttctattttacagtcaaggaaatgatcaacctgtttattcattcatcaaacatttattgagcccctacatggagccaggccctgtactgggcaatggggatagagaaatgagttagactttagaatgcataagattccccttggaacttgcttaaaatgcaactccaggctccacctccagagagtctgacctatttacaagggtgattctatggctggtggcggtgggatcacacttggggagtgtgcagtgcatgatcttttattctacaataatggtgtgtgtgtgtgcacatgtgtgtgtgtctgtgttgtggttgaggtccaggaacgtttctcagtcaagatgacatctgaaccggaactgaatcagaaaggatgaacgagcttcttcctgtgcaagggacaatcttcttacagggtaatttaccaagaaccactaaacctaaaaatgtaactactttctgaccctcacatgtgtgcacaagacaacacatagaaggatgttgattgcagcattgtttgttagtgaaaaactggcaataacctagctgcccaggagtaagtcagtggataaataaaatatggatcatatacctgacgttagtagctatccacggtacagcactatgtgccaggcactgttctatgtgcattttgtgtgacaaaacaaccagaggagataggtactcctattactttgtatgtactattattactgccatcaccaatcccttgttttacagataaggaaactaaggcacagagagttatacaactcacccaaagtctcatagctagtgagtgataagagtgggatttgaatgtgggttcttggtgcaagtgcacgaagagaaaaagaagagaaaaagcagtgggtgtctggagaacttcaaatggctcagaactccagcatggggtagtagcaggtggctaagagggaatggagaggattccagaatggttaagatagcagtgctagtttgggctagatgagagaagtcctgaatgccaagctgaatatgaatttgaccttacaggttagcaaagggacttgactgaaagattggggcccgtgagtggagatgatgggtttgatcagggcccacgtgggaatttaagtaggagtccagaaaactgccctcctgagcttcctctttcatctgtttcttgctcaaatgacccactcccacttggcgtacaaacattccccgccatggcttgtttacaatctgtcttaacccctgcctcccactagatactagtctatttctctaccttcctatccctattcacaataaaacttcccaaaagcatggtctctactcactgtctccacttcctcaattcccattctctcctcagccatttccagcctggctcccaccccactacaccaccaaagtcaccctcttcaaagccatttatgaccttcttgtagccagatgtgacaggagctcctctctgctcatcccacaccaactctccccacattgacacagtggatcctgcccttcttcctgaaactctcggcctctggaaccttacttctgggtctcctcctacctcactgggtggattttcctcttctggtgacagaggcacccttgtgctcaatcgtgggaatcctctgctctgtgtatactcattccctgtgatgtctggtagcccacagccttaaatagcatctctctgctaaagaccgtgaaatttatgtttcctaccataacctcctctcccctgccccgagctccagactcatgttcaactgcctactctacatggctccttagctggcaaacagacctctcaacctaacgggtccaaactgactcctgggtttcaccttccaaacgtgctcctctgttgttaccactttaataagagacagcatcatccaccctcaatcaaactgaacacctaatcagtcctaaaatctaggaatcagttatttaaacttcttttctagtactgggtttctcagcctctacactattgacattttgggctggatactttgttgtgggggattgtcttacactgtacatctacactgtaccttctagcatgtttggtgtcttcctctaggaggtgacaggatccacggccagatgccaggcccattcagggtcagccctctctgctaaggaaggccccagtgtggggatggggtgcagcagggtaatgttgaactgtgactcatggccaggcagccctggtacaaacctagagggcccaagaggcctttagcccctagatgctggtactagcccctgctccagttgtgataaccaaaaatgtctctgaatattgccaaacattccctggtggtcaacattgctcccagttgagaaccattgccataatataataaatatacaaatgtatctatcataagtgtacatttgaagacattttcacaaatggaacacaagtgtgtaaccagcaccaggtcaagaaacaagaggctgggcatggtggctcatgcctataatcccagcactttggaaggccaaggcaggtggatcatctgagatcaggagttcaaaaccagcctggccaacatggtgaataactctctccactaaaaatacaaaaattagctgggcacggtcgtgggtaccttgtaatcccagctacttgggaggctgaggtaggagaatttcttgaactgggaggtggaggttgcagtgagccaagatcatgacactgtactctggcctgggcgacagagtgagattctgtctcaagagacaaaaaaaaaaaaaaaaaaaaagaaagaaacaaaacattatcagcaccctagaagcctgcttgcaatcactacctcttctccccaaggggtaccactatcattacttttttttttttctgtcacccaggctggagtgcagtcgcatgatctctgctcactgcaacctccgcctcccaggttcaagcaattctctgcctcagtctcccaaatacctaggattacaggcacccaccactacacatggttaatttttgtatttttagtagagatggggtttcaccatcttggccaggctggtcttgaactcgtgacctcatgatccaccagccttggcctcccaaagtgctgggattacaggtgtgagccaccgcgcccagtgccactatcattacttctaacagcttagatagactttgactattttttactgtatttaaatagtgttatagggtatgtattcttttgtgtctggactcttttttatcaaggttctatttgtgagattcatccatattgttctgagaattgtagatggtattccattgtgtgaaggtactacgacttatttctctattttactgttgacaagcatttggtagattccaatttggggctattatgaacaatgcccctatgaacattcatggtaaatgtcttttggtgatcacaagtagtcatttctttcgggtatatacctaggagaaaaactgctgggttgaaggatatgtgtacgttcaccttcagtagatgtttccaaatagtttcccaaagtagtttttgcctaactacactcccaccagcagtgtgtgaattgccaggatttctccttgacttcactcttatggtcacgtgtcacatccgatccatcagtgggtcctgatggtttcactttcaaaacctaactggaatcagacaactgccaccactctagtctggctgtcatcaccccccagcttggggtctgcaggagcctcctaattagatttccagcttctactcttgccattctttagttgaaccttcgcccagcagccagaatgatcctgttaaattataaattggatcacatcattcccctgctcaaaaaatccaggatcctccccaaagccttcagaagaccacatgatctgcccttctctcctccctcatctccagtcactctcttctccactcactctcttccagacacaatggccttgctgtttcttggacagtcgggactccttctcactccaaggctctgcatttgctgtttcttcttctagagaactcttccccctagatctttgcatagctggcccttctcatcagtgaggtctcagctcaaataccacatcttctaggaggccttctcaggccacccctaaagtagtcctccctcttacccattatcccatggccctagttttaaacatacatccaatctcaaatgatctcatctatgcatttgctcacttataatctttttctccttattagaatttaagccacttgagggcaagaagccagtggatctcatccaccgacgtatccctcgcaccattgaccgaaacacaggagcgctatcgacatgtgccgaatgaatgaatgaatgaatgaatgagccccaggtgtttaggagaccctaacagaggtgcccccgttgtagggacgactctcacctgcagatggcctcctcaggcccttcgggtggcactggggagcccagggcctcccagcgaagtggccagattcaggaacccttcgcacagcgggcactaggaccctgcgcggcgccgcgtctcgcggggggcgggcgggcggagggggttgggggatccgctctttctccctcctagagcctggttgcagccacttgtgcgatcccggaccttgccgcggccgcctggctcctttccgcgccatgagccgcaggttcacggtcacctcgctgccccccgcagggcccgccagaagccctgacccagagtcccgccggcattcggtcgcagacccccgccacctcccgggggaagacgtcaaaggtagaggccgcagggggcggggcctgccagggccgggcgggacgagggggaggggccggggcggaccgtctgttgaagggggcagggccaagaccgggggcggggaggggtcccagccctaggcctgagaggggaatggagccaggactaggaaaccaaggggccggggccgcggaacgcaaagtgtggagggggaggggccaaacgcgaggtgggcgtggccacgagggaaaggggtggggccagggaaggggtttggacggaggcgaagggggcgggtctggtgatggaaaggccggggtcaaggtggagagtaggccgtagggcactaaaggggcggggacatctcgagtagggagcgggaccagagtgaggaggtggaactagggaaaaagggggctgtgtgttgaagggggatggtcaggagcccctaaaggggaggcggcgggactaggttggtttggggtcaggaaagggcgggactagtagggaatgagttgggccaggaggatgggagtggggcctgggaggggggtggggtcgagggcgggaggaaaactgagtcagggttgccgaggcaggtgccaggtcagcgggtcctcggtgcctggcggatcctccaatcctctagctccctggaggcttagcggacagcgactggggatcccgggaaggagacgggaggcagggaagttagtatggatcctgggcagcgagattcagggaggatgccgtagggtcgctgatcccgactcttggggacccacttagctccttgtctgctcgagctccgtaagggttgggaggagccagctcaggcggggttgggggcgtcttcctcgcgggccctgtgcagggtcttgtaatggaagttacacgcagggcacagagtataggggaggggaaagatccttctggccttcggtggagaagtagcatcctgggcgcgtgcacagtctcccctcagggggcactcatcaggggtcctctccctggctctgaggccctcgggtctggaaggaacaaggcgaatcggcttgtagtggccccagcgaggggaggaggaggaggaggaggaggaggaggaggaagaggaggaggaggaagaggaggaggaagaggaggaggaggagaaggaggaggagaagcctccccagaccgccaggggtcgctgccgagccgcaggtgagctcgccccgaagcaaacccaagcgccgaaacccctagagtaacccttagggggttatctggcggacctcctcattgtacagatgaccaaattgaggcctggaattccgaatggccccagtcccgggaaccgaacgcctcctggttgtggccacttggatttcttgggctccttccactcttcatctttctcataatctcttttctcattttcatgaatgaccttaccagcctcccagatttgaaagtaagaaattctggagccattctcaacccttccttttttctttccagcaaatccaactgatccccacgtcttggccattcacctctgaaacttatcctgaatctggcagcatcggtcccccctctgtcatcatcgccctgctccaagcctcacatggccacgaccacatcctctccactggcctccctgcctccagtccttccctagccctcctccacagaagccccccatcacttgcaaaataaaggccaaagccttaagtctgtcattctctttcctcatttgcttctggtgttcttgtccacattcattctcccacctccatcagccaggaaaactcctattcgttctgtaagttatagctcatttaaccttttccaaaaaccttttcagtttcctcttcggcccacccactgcacccttagtgcacatgtcccggtggatggcagtcgttttctttacttatgggtatcctccattggaacatctcaaggacagggaccatctcctttatctttgtgttctgagttccagacccagagcctggcacttagtaggtgtgtaatgctcataagatgagaggagggtggctgtgggatcctgcttctctacccttgccttctcttctctcgctcctcatcccctggcttaggaataagacggccctctctcatgtcccaaggtgattgctgttttcccattcacactctcagatgccggtactcacactacttcgctggggtcgaagtgaaacacagcccccaagctttgggtgtgcaggtgtgtatgagcctggaatgctgtgtgctgtggcagaggctgtgtgtgtgtgtgtgtgtgtgtgtgtgtcttgtgggaggagcatcccccattagttttgatgacctgtggggtggtcagtgactcactcagtgcttctgtgtgtcactatattgccagcacgttgaagggtgtgctgatgtgtacatttctgtgtctatctgaggggtgggtacctgtgtgcaggagtgtattggaagttccatctggacaatgatttgggtgacttttaaccttttaagcctgaagcagtctcaagcacctcctctctggcagatcactgtatggggaagtagacaagggctacttaggggaacccagcatctgctggtatctttcccatagctgttcttgtgtcagccctctagcccctgatagattctctttccacctcttgtcttcacccaaagggagggatagcagcatgtctaagactgggaaaggttgggggagatggtgtgggtgtgtattatcttttactctgggccaaatgagtggggtttgccacttggggggctttctgctgccagaggatgagccataggtgagaacatgacttacagggagttaaagaagcaaggcaaggccaagcctcaaatctgccactaaccctggattgcgggccacacacctcacttgcttcacctgtgtcatgggagattgatggtgacttggatgaacagaagtagacctggtgacagttgttacaactctgagatgctcccctattcctttatctgatcctctactatgcctccatttctcaggggggagtcagggccctgaaaagagccctgggcctggtaggactaacaggagttgggatgtgtccccatggagggagagggagctaacttatgctgggaggatggagcaagaccacaatgtagcccatctgtgttctagctcaggctctgtggtgtgaccttgggcacacttcttcccctctctgggccttaatatacccatctgtagtataaaggagttgaacaggaagctatctaagggtccttctaaccataaaaatgctaagattttgtgatgatttggaaggatgaagctgtctgccttctctagacacaaacctcatgtttcagtctctccatctgtaaattgggaagaataatgctgttattggtatatatgttggatctggagatttccagtctgtctaaggagatctccagtcatctcatccccaagccagaactcagaacctcactgcccggtacctcagcccaaggtgagccctaggaatctccatggcaacaaactggttatgaacggggctgcagttgccatggtgacaggctgctctctctttctctctcatccccctcctctcccctccccttttctcaatgaaccagagcgatctttaggcctcagttctccaggtggggtggggatcggggggtgagtgcagtgagaaaggggtccggattgggaaagagggaagatggactgagtctgcagaggaatgaggggctgttggggtgctgttgctatggtgatggggctgcagcctgttaattaaacccccggttgccacggagacagtggtggttgacgtgctccgcagtgagccctgtgtgtgtggggcgtgctttgcgctggactcatcaattcactgctacagttttgggtccgaggatggggcatgcgggtggggaagaagaagagtgaaggagggcattcaggaccctgggcccataaggccacagccagcggtgggtgggttaggttgtgggggtaatgcagtggagatgcggagggagagggattgagccataaggaggaatgctatgcctgcctcctgtgaaaagaggacccagtccggtggctctagcttcctccaaccagccccttgtcctggttcagtggatggagtcccggacaggaggtcaaggggctgggttctagtccctagtctgttacaagttcaccccatgaagaaaatatgaacctttccattttcagactccaatttcacaataagtggagagtggaaaataatttataatatctcttccagttcccaaatcctgacactcaggaggcagcttctctgagcttttttctctctgagacatatggtgggagggggtatgagtttgagagactcagagtttagaaataggaccctccctagccctgcatcttgtgctgctttagtgagagggtttctctggccccagatctccccagggttcttggtggggaggggatgctgtactggcagccaggttcctggggctctgagctgtgggtcactttttactggccagtgccaggctggcagtgtggtgggtgcctgccatgtgttttctctgaacctcaccacagagagttggctggaggccagaatagggcacagtcttcctgagaggtgaggggtgtcagtggaggggctggggtccccccttgggactgtctgctcacttggtcggggctccttaggaagggatatgtggctttggtctgagattaatagagcactaagagttttcagagcaggaagaagtgccatggattatacgacctaactcatttttacagacgggatactgaggcccacagagaggaacctgattttgcccagagatacacagagaatttgggggcagaggatatgacagaaccactatctcctgaatctcagatggctcttgagatgggaactctagtgaaggtggacagatgggttccccagggaaagaggaatcactcctgccttcacccgtactccctagaatctaggtttccccatgcatgggcttagtctctgagtggccaaagctggaccacaaatgaaggaaaataaccccaggggaacatgccagacctaggattactgaaaaaccttagcatctccttcattctacagcacttctctgacaaacatgctacacgtgttttactgttatgcatctctgcagagtagtagaacacagtgctgctgctgctgctagtgctgtgtgtgtgtagagtggagtggcatgcttaaaaatttttgaacactggcttcttttaacctctgtcaccaattcaaactcatctcacccttttggtggtttttttctctgggagagccaagaataccagtgcccacaacttgtctgaatagctaactctccaccctgaaaggtcctttgggtatccaaaaaaccaagtggcagcgatacttgattggtaggtccctcagaggcacttttgagtcagctgctgaaaactccacggttgacccaatctgaagccactgacaaattgtattaatacaagtaaagctgagccctggatcctgtccatggtcctgaaaaaagtcctgtcctataccccggtctccagggatatgaatggctctttaggatttttgcaggttttctggaggcttccccttcagttgcaagccaagagtccattctagccctgcacctctgaagcctgagcacaagaaaaggaataaagcacatctcagatgtagtgcctgtttgtttgtttgtttgtttgtttgtttttcaggagctaataatcagaggctgctgaggggcatggatatgactgcatccttgtctcttctatggaggcaagacgacttttataagttctatcaatgaagagagtcctaaactggagtaaagcaaactggatgctagaccaaattctgccatccactggcattatgtccacaggcagtcattttccctctatgggccttagttttttcatctgtgaaatgaaagctgtgtgtaagatacaatgactgatcttttcccaaccgaagaacttttctggaacttagagagccagggagagagctagtaccagtgtgaagattgtttaccccgatctgctcccaccctcagatgtttagatcttctagagactcaaagctttcaaacctctgatgccacttcctgagatgtctgcaccactggctcaaacctggactctaggggctctgaggggtcccaggatgatcaagcttctgggggattggcctaagggaagaggggaggaggacagagagcatgtcggctctggaagcctcagaaagcaatcctggattaggggattagacacttctgccccaggagaaaatctggtctcaaaccgacaggcggcctcattccgccctcccccactctgtccctggccagcctcaggaccggcctgtcctccctagaggctgcaccatccctgatggaaagtcagtgctccctggaaactcactgctgcctcttctgctcctcctcaccaggtcttatctctagatcagtccgcagtcagaaggtccctggctgtgggctccagggacttgtcttgggggtgggacgctgggactcttgtcagtctaagcacaatgagagagttccttggaacttctcaggcgctaccccacccattttaagacagattgggtcagtcagcccagtgacctgaacgcccctgggggtagcacattgcttaattatgggccctgggctctacatgcctccagctccaatctcttgagcagtggtatgaaagagggtctggttctcctcccccacttcagggctggcctctccagtcttgcagagaggcttcccaagggccccatgttccatggcgcacctccacggccacttcagtgccctttatcttccccctgggggttaccccagacccccagtcaagcagccgctgcggggccgcctccccgcggccgcgacctagttccctgccgttatttttagggcgcgggatggcacctgcccacgtgccgggccccgcccggagagtgggtggggggagctgcgtctgctcaagggaggcgaggccctgtcccccgaagcacccccttcatcccacccacgcaatcccccagtttttgtgcaagggggccactagtcgggctctgcccgcccctcatcttctcttctctctccctcccgctctccccccaaaaccccgccagtggctcacgcctcctgcatacgggatgaggtgagcagcgccgctgctgagagggggcgcgcgcgggtgtgagcgtgtgtccgtgtgcgagtgtgtgtgcgccgggcgggcgggcactgcagcttcttcctccgtggagcggagagcgagacagagctacagcgaacgagagagcggcgaaggcgggtagaggggcgcgggcgaggcggcgcagccatccccggaccaggggccgcgccgccaccatgctaaacaacctgacggactgcgaggacggcgatgggggagccaacccgggtaagctgtggtccgggggcggcgggggagggggcagcgaggagaggaggcagctctggggttagaggcggagcgggggccacctccttcagagaggaggctgggactgacccgggcggtgggcgccagttgcagcctggagctcagctccattggaatgctccgggcgctgtccaaggtgctggaatgcgccgcgcccgggggcagagctgcgggccgggggattatcgctgcccacggcttcgggctgacttgggttagctaaaccgaggaggcggtgggaaggggatagaagacctagaatgggctgatgtggagctcgacggcgggaggagggctcctttccccgacaggggaccccggcgtcctggcgcagagcaggcacccgtggagccggggggcgcagtctgctgcagtccctcgttctaagacttccatctggaagatgggggaagaggtggctgtgtgtgtgtgtgtgtgtgtgtgtgtgtgtgcgcgcgcgtgcgtatgtgtgtgtgtgcgtgtgtgtgtgtgtgtgtgtgtgtagggggtttggagccatatgacagccccccgtccgggctgtggtgtctccttaagacacccagattgtccccttggtgcaatctgggacccctcccccaaggcttcccaaggtccgacctcagactgaagcgtacttcctccatagattttcagctctactttgcagaatctctctctcgctttcccgtgggttcctattcaggacgggaagcaagatcaccctcctttcttccctctttccccctcctctcagttccctggggcggtccagggcggggcgggggggagtctttttagttagctctgctagcttccccagtgaggcctcagaaatggggtcccagtggctgattcctcagcgccgcgacgcggacactgcggacgcgctgcggtgggtgcggagactcgcaaggagccgaggggcttgggacaagtcctttcgctgctcccgctctcccccgccctcctccgcggcttccttgctccgaggtcttggggccagccaccccctcaggctcccaggccccccgccgcccccgagcggtctcagccatccatcacggctgtcagccacccccaccccccactctccagcggcgctgcgtcccctgcgcactagcgcgcctcccgcgcctgctgtctgcgctcagcgccttcaaacgttcccctgggcactgcttgaccctatgagcctagactcccgcagatccctctggcggatggcgcctagggctgaaagagcagggtcttctagggattggcaaccttgactctgaggtcctccggatcctggatctcagggccaagtggccgcttggaaaggctggggacaccagggtccctgatcctttgtctgactcccccccaccccccgccgcttcccgcaactcctcattcctcctgggggctgagtggtatacaggtgccagaactcctagctggccctctcatccacctccccagtgaccctgggatcacctcatccagcatccgccccctcccccgcgggcttctggccggagggggagggggtttggcaaagttgagtctgcggcagcgccaggcatcccgacgcggatctttccatccgggatccccttcagatgcctccactctgagagggggactcagatggagagcatctctctgttccctcagacaccaggtatggtcccatttcccagcacccgctttctctgccaaggtttcaccaggccttggggtttccacaggggctcaggaggcctagaaaagaggcatcagtgtgtgtgaggcaagagttgaactaggaactcgcttcagttctatcccctctccgttagtttctagacactgagtgcagcggacccatctggagaccttctttctatacatagggtccaggacctggaactcaaatggccagaacctgggtcatgtgctgtgggtcccagagagagaagtcccccctcctccaagcggtgcttggagatggtagtaggaggtgctaaggaccttctgggcttgagagaggaccatcaggccaagagcccctgacatctctgattctagattcttggggatgtacgggaaggaactggttgctgacctcgggcaggtggggatgacccgagcaagagggcacttctggactaaagaagagcccagggatgtgtcccggtcttctttctccttggggtctgacgccccgtctccctctcggacctggcctagggattcccccaggcccagccccaggccccggggaggcttcttagcctgcgccgctcgcctgtttcctccccgggagctctggccgccgcagcttaattgaaagccgattcgggttgagagctcccagggggcgggggcggggagggctcagcctcagtctggccctgcctctcgcgcgcgcgccgctcggcgctcccgccatcacccttactccttggctccggggaatcagggcgagtttccccttagctgttctggtcctttgagaactcggaagctcattccccatccccctcaaccagtgcgcctggcgttcagggaggggacgaaatcagccctggctgacaagtcccgggagcctggcgtcccgcccaggcagctactggaaaggcgggacccagaactagcctacctagccgccctctcccctgccctcatctcctggcccggatccggcctggagtctggctccgcgctgcgcgccgcgttacataagcggctgcgggcgcgcggccggctaggctcggcgctgcgctctcggcctgcgcggtcgccatggagaccggcgcggggccacctagttgcagggtctcgggccaggaagcccctattcctgtcccctgagcgccacccgcccccgcgaaggaggaggcgcttgggagggggtgtgaaaggcagaggggaggggttctcctgtctggttgtcctggccctaagaggggatgctgcggggaaatggacccagctccataggagacaggaccccaaaatcttgcggctggatatgcggctggagatgtgggatggggagccccggctgggtgggcaccaagtatgttaataataatcgcaattgtaatgatagcaatagccacactcgtggcgggcacacctaatatgcatgatttaatttaatcctagcaacagccctatgagttaagcttggttagtatccctttgcaaaggaggaaactgaggcgtagagaatttgtgacttgctgaaagtgacgacacagccagtgaagctgggactggaatgtcagtttccataactccagcccccttttttaaccgttaggaaacatcctttcacctcaggtcccctcagtctctagtccacaccatgatgtgctgagaacaggaggcatactatcagcattttaaaaggacctcttccttgtttctcctgttctctggccccagagagctcttctgagaccctggggtccagaagggagccctggagaacttagctccaaagacttttcctgagcacctattatgtgctgggaggtgggtctcttattcccaggaactcacatatgtgagaagaaagagctgacgattgcaccctatttgacaaccgggagtttctgccttgatggatgaggtggaggtggtggcagaagactgggtggtgggtttctttggagcaggcgaggcatcactcctcctggcccaatttttagtcaggaagagattggttttataacagagacaggccatgctctggctgggtgactgaggaaggtttcccggaggtagagaggaggatggggaagacgcagacggatggagatggggagaaagggatgtcagccatcgaggggacaggagaatctaggtgcctagggcctcaatttcacttggaatttgatcagcggggagtttctccagtgtccagagagatgtcaactgctggaattcagccccggaattgaggaagggtcatggctgaagccaaggaaatgtacctatggggcctcttatatctttctgaagggaccttcccccctggtgcccaagatactttctcctcgagtgatctcatctaggcacatggcttcacacgcatactacacatgtttacatagcttacccccatctctttctcctgcctagcctctttgctgcatgtatcctgattcgtatatccaggtggcttctgcatgtatccacttgagtgccctacagtgcctcaccctcagctaaattcagcatcttccccacctccaaactccttctcttctagtcttcccatttatcaaatagcaccatcatccaaccattcacccatgctagaaaccgcagacattatcctaggttcttcctctccccctccccaaacatctggcatggaaatatgccaataattctgtctgttgctctacattgctctggtcaggcacatcatcagcccttacctgggttactgaaagtctctaactacggtactctgttttcttcacctaaaagccagagtgatggctctaaaacatgggtttattcatggtattttttttttgcctgaaactcttcaatgactccccattgccctctggatgaggtccacattcttgaacacgacctgctaatcatttaagggaccagcctgcgcttcccttcccaggctcaccttttcacttttcactgccccttccacagactccagccagatcatacttcattcctctaacccactctattcactgtcacctctgggccattgaacatgctgttctgctattctgtctgcctggaacaccctcccttcctccctcccaggctagctcttactcattcttcagctctcagcggacacgtcacttcctctgggaagactcccatgacctcccaatctgggctggatgcctctcctgtgtcccagtcccttgatcttctatcctagaattgaccatgccagattggaaattcctggctactggtttgtctccctgcacttgggttgctttcctgagaacaaggatgatgtcttctgtgtcttaccctgcttcccccatgcctgtattggcacacggtagacacttggtaaacacattgtgaatgaagatgaataaagggcataggagatgtcagagggggtcacttcttcaagaagtggcacatccttggggccttgatctgtagtgctcctggaaggcagaccttctccactgggaaagaacatgcctccaccccaaacaccggtatgagcccagctatagttaagaaggaaactctggagagtcttggggtgtcctggtaaatggaataggacccccaagagcaaggaagcactcacacatctgttaatacgcagtgcataccagctagtgcattaggctctgtatacatgctgtcaactgcaaccctgcaaggaaggtggtattagccccattttcccaatgcgcgaactgagattcagagggctactgtggctacaccactgtatgcccaggtggttggacaacaactgattggttccagatccctgacccctctcccttctcaggtgatggcaaccccaaggaaagcagtcccttcatcaacagcaccgacacagagaagggaaaggagtatgatggcaagaacatggccttgtttgaggtgggctgctagggctgttgggcccccacctacaattcattatcctgattcatcagctgctctctccctccctccctagggagcaataccctcgtctccacccctcccttgagtctaccttcttccttgagcctccccatccctccttctccctcctgggatttactccctctgctccctgccctctcctcatcctaccattcttacccctgttctcctcacctgttcctcctcctttcccatctcatcccaacctgaatagtttcgtgctccttgtccccatctcttcctctgcccttcgccacccagctcactccacttgctcccccagcctcctagcactgacaccctccctccataggaggagatggacaccagccctatggtgtcctccttgctcagtggcctggccaactacaccaacctgccccagggaagtagggagcatgaagaggcagaaaacaatgagggtggaaaaaagaagccggtgcaggtgaggacctcgggggatgagaaatggaagaaaagggacggatggggggtgggggaggatgggggaggaaaatggatttgaatggagggagggaaaggggatacaaatcagaaagaagagggatgaagggttgagaatagagagaagaggaaggtgggggcagagaaacatggaggaggagcacacctggggtgttcgtaatgatgaggactgcagagactgatgctggcctccctggcaggccccacgcatgggcaccttcatgggcgtgtacctgccgtgcctgcagaacatctttggcgtcatcctcttcctgcggctcacctgggtggtgggcattgcaggcatcatggagtccttctgcatggtgttcatctgctgctcctgtgtgagtgacacccctcccctcaccaccccctgacagctggggcttggcagaggcctgggggtgggaggtgggaggatggaagcatgagacctgagctttttataggaaccactgcttatgatctttgagagtaaattaggcctgactggtccttcctgcatctcacaggcttgtccttgatggctgttaaccaggtttcacctggatctctctgtgtgtaattacacaagtgatgcagctcattgatggaaatgataagggtagggaagaaaataaaattcacctataatcttacaatagttaacattttggcaggtccagactcacaaaaatgagattacatgtcacaaacagcattgtaaccaaattcttcccattctctctaaaaaaatcaaatattcgccaaacacctacttcttgatatatttacatgtcctcgtacataaccttgagacagctctgcatgtgaggtacgcagtgtcggagctgttactcctattctatagatggagaaactgaggcttggagaagtgaagtgagttgtctcaggtcaggcagctggtctgagaccaggctgggatttccagagctctctgatgctgtggcttgcttgggctccttccgttcgcatggtgaataaggttttcttgagaagaaggacttggcaggagtagaagttggaacaggtccagggagcagctcagcagaagagaacctgtgggtttggctggtgtttatggggtataaggcttggcccccacccaggccactgcggcccctaccccagccaccgctctgatgatctctttcctcacagacgatgctcacggccatctccatgagtgcaattgcaacgaatggtgttgtgcctggtaggtgactggggctttgtggggagggaggatggctgggtggaaggagggatagtgccctgggctttgggggacatcaaggcccaagagagataatattctagactagggggctgggctgtatctgttttcagccctattgggggcagaggaggaggcagctctcggtgttgaatagggcagccctcccccaactcatcctgagaccctcctctccaccatccaattttctgagccatgacctccttaaaggggtaattagcaacatggtaattagtgctgcaaaatccatgcagagtggttgcttgggtctctcaccagtcccctttctagggctgcagcccataagcctgtgaggcctggagcaacccccttctgcctctgtcactgaacacccctcaccccttacggcagcccagtgcccccgaccctctcgctgataccagattctccctgcagctggtggctcctactacatgatttccaggtctctgggcccagagtttgggggtgccgtgggcctctgcttctacctgggcactacctttgcaggagccatgtacatcctgggcaccatcgaaatcctgctggtaagagaggctgaggaggaggtgtggaaccccaggttgtcagtcagttaatcagtgctccctggacacctcctataggccaggccattcagtgaggccaaaaatgtggttcagtaaggccaaagtcagatgtggttctgtttctaaagagttcacagtctagttggggagacaagatacaataattatgtaacatacacagctgtcgtttatcaggcccccactgagctctcagcatccttccaagtgctttccagccattctcttgtatccttacgaggtttaagtattatgatgcccattttacaaatgagaagctcagagaggtgagataacttcctcaaggtcactcagctctcagataggcggcagaggtgggttgatgagttaaaatatggtagaaataaaaacagtaatgttatgcagcagctaccattgtgtgattgcctcccaaggggcatggactgtgctaggtactctatgatgttaatggtagatggctggtggctattggattgcaaaagagaagaaccaggggagggatccgtataaagacatctgttgggaatagtgactgatggagagaaaccaggttgctgggcagtgcttgaagtcaggactggtgacttaggtctccatccttcatccccttcctgtagggcatgggtgctgaagaggtgtccctggtggataggaagtagagctgacatgtcccaagcccctactctgtgcaggccccaaggcttgaagtatatcattttattttatcgtcatgactctctcatgagttaaaggtggccattttattttattttattttttatttcttttgagacagagtctcactctgttgcccaggctggagggcagtggtgcagtcactgacagcctcgacttcccaggttcaaatgatcccccccaccagttcagcctcccaagtagctggtaagcaccaccatgcccagctaatttttgtatttttttgtagataggggtctcactatgttgctcaggctggtctcaaactcctgagtttaaaatgatcctcccacctcagcctcccaaagtgttgggatgacaggcgtgagccactgcacctggctaaaaggtggccattttacagatgaggaaagcaaggctcagagtttaaggaacgaatggaaggaatatgaaccttggtctttctgacttccagagccttacacaagtgatgcagcttcattgatgaaaatgataagggtagagaagaaaataaaattcacctataatcttacaatagttaacatatggtaggtccagactcacaaaaaatgagattacatgtcacaaacagcattgtaactgaattcttcccattctctctaaaaaatcaaatattcaccaaacgcctacttcttgatacatttacgtgtcctctataccacactgccttggaaacctagaactagaaggtgtcacagcaattagtgtcacggcaggatggaagagggtaggacagggaggatggatggggcatgaaaggcctgaggaggcaaatgatgagggagaatagacctccatgacttctaaaaattaaaatatttgaaaattgttgtaaatgcaattctgcccattgcagaaaattgggggaatatccaagtcatgaaaaaatgtaaagaaggaaataagtcacccaaagaaaataaccattaacattttggtgtattgccttctagtttttgtttttctatgtggtattgtattctgtctatgtaaaatataaccctatacctaagcaactcatattctctttgtatatattatttgcagtgaaaataactcttggaagaatgtaaacgttaatatttagcatgggaattttagaaaatacagatgtgcataaagaatagattatccacattttttacgattcagggaaaactactgacaacattttgatgtacttatgaaaacacatacagacgtatactaatatacgtatatatcttcacatacacatttataaaaatgagataatgagacatattctttttcaaaaacctgattgtgttcacctaatgtaccatggatagcttttaaagtcagtccatataaatctatgtcatctggccgggcacagtggctcatgcctgtaatcccagaactttgggaggccgaggcagttggatcacctgaggtcaggagttcgagaccagcctgactgatacggtgaaaccccgtctctactaaaaatacaaaaattagccaggggtggtggtgggcacctctaatcccagctactcgggaggctgaggcaggagaatcacttgaacccaggaggtggaggttgcagtgagccaagatcgtgccactgcactccagcctgggcaacaagaacaaaactttatttcaaaaaaaaaacaaaaaaaccaccaccacaataaaaaaccaacaacaacaataaaaaaccaactacatcatcttttttaatagctccatagtctgtggggatatcatgatttattcacccaacctcgagtgatgaacatttatttccacctttctattagaaattattaaaatgataaataattattaagaattataattaacaaaaataacagaagtaattgcttccagcatccttgcaatgtcattttttaaaaaatgtatttttatttgtttttgagatggggtcacattatgttgcctaggctggtattgaaatcctggcttcaagtgatcctcccaccttggcctctcaaaacactgggatcacaggtgtgagccaccatgcctggccttataatgtcatttttaaatggctgcatcatagtccttgcaggacaggccatgccttctttagcgattctcctattactggatgtcttttccagtctggtaccactgtgactgtgctgtgatgagcatcttttttcctaaagcgctgcatgtagtgcaaagggctgctgacttaggtatctgttcttcctgcccctttcccacaggcttacctcttcccagccatggccatcttcaaggcagaagatgccagtggggaggcagcagccatgctgaacaacatgcgtgtttacggcacctgtgtgctcacctgcatggccactgtggtgtttgtgggtgtcaagtatgtcaacaagtttgcccttgtcttcctgggttgtgtcatcctctccatcctggccatctatgctggggtcatcaagtctgccttcgacccacccaacttcccgtgagtgctgctgctctgagcccaaggaatcgtcctcctacctccctggccctgtttcagagtctctgccaaactccccctccctgcccctcagaatctcagagtggtgtgggttgggagtagcttcccttgggagggaaaatctctcttagtttgggggcaatctcttcagagtgaggtaacttttctggaggagggaacaatttaccttgtaagagtcaacttcttgctggtagggtggacttaggaagaattaagtgggaatgagttccaaagcaatgaatgctgtctgtggtagggaaacctttcctgggtggggacaacctcctggaatgggacaatctcctagtgttggacaactcctccaggatgggaaaagacacagaagtctacagggtccagggactcagatccaagtccactccatccactgctcagaggtggagggcggcccccgagaccgctgtccacggtgctgaaacacagcattgcactaatgcggtgcttctccaccttggctgcttattagaatcacttggggagcttaagaaaaaaaaaaaaaagccaatggccaggcttcatttaaattaaacgaggaactctggatatggggacctggcgtccgtgtgtttaaaaggtctcccggtggctgtattgtgcagcgagggcaaggttatgtggctccccaccttcctcccttgtttctctccctaggatctgcctcctgggtaaccgcacgctgtctcgccatggctttgatgtctgtgccaagctggcttgggaaggaaatgagacggtgaccacacggctatggggccttttctgctcctctcgcttcctcaacgccacctgtgatgaatacttcacccgaaacaatgtcacagagatccagggcatccctggtgctgccagtggcctcatcaaaggtctgcggagggacaagggctggcatccagggaacgctgcagggattgtaggttaagcggtcaggattaaggggccctccttgggattcagctaaattcaatcagctttaattgagcacctactctgagttacattctgtccttggcatcagggaggagtaaggtgaaaaggagacaagtatctcaccgctagtaggaaaagaagtcatcaacgtaacaggtggtcactgagcacctacagagtgcccagcattgtgctgagtgctaggaacacaaaataaataagccacagttcctggcctcaaggagactaatggcagaaatagatgtaatagcaaatacattatgccatatgtagatgtgcattcaatgcacagagaatgcccggggggggagagttcatgtgtataagatggcaataggcttcctggactcaactgaggagggttttgaaggacaaatgaaagatcttcaattctatgagaggagtaaggaaattgcaaccagaagaacagcttgcctaaaagcaggcagaggcagaagagtttattgtgtctttccaatcacaagtaatttggtatgactggggcataaagagcaaaataaggtggagaaagaagcgatgtaggagaggctggcatgagccagatcatggcaggccttggaagccattttggagagttgggaccacattctgaaggcaatgaggagccaccaaggggttttgggaaagggagggacgtggtcagatctccattttttgaaggttcattctggctgctaatgtggatgggttaaaggggtgagaggagagaggcagggggcccaggaaggggctgaggctatgagtccaggagagagagatggtggttttctgagtgagagtgatggaatgatgtctgtgggaattactgcagtgcttctcaaccagggctgttttgccacccagtaaacatttggctgtgtctgcagacgtttttggttgtcaaaactggaggggtgtacctggcatctagtaggtagaggccacgatgctgctaaacatcctacaatgctataggacagtcctccacagcaaagaattatctggccgggagtgtcactagtgccacagtggagagaccttggaatggagagaaggggcatatttaagaaatattaaggaggggttaaaggacagaagttggaggtggtattgaagttggggaaggggagagggagcagtgtagggcagggtgtcagaattgatgatggtgccatttactgaaatatgggatgcaggaaaggagctggtttggggtgggtggagggtgagatcaatttgggacacatcgactcaatctgagatgggtctttatttgctcatttactccactagattggactgtttgatggtagtgactgggtctgattagtctgtgaaaggtctgtacatagcctggcccaaatcaggagcttaggaaatgtcagtggaaatgaaatagagataaggccggggagagtgagatggggttgatcttgaccctgactttttgccccctcccacctcctggtcccagagctctggtccccttatggctggcctccccctgagcattctgtctccccacagagaacctctggagctcctacctgaccaagggcgtgattgtggagaggagtgggatgacctcggtgggcctggccgatggcactcctatcgacatggaccacccttatgtcttcagtgatatgacctcctacttcaccctgctggttggcatctacttcccctcagtcacaggtgaaggggagctcagagagggaagactctgcctgtgagtggatggggaagagagagtcgatgatgatgttgggaatttcttagtccaaaaaccccatcatgaaagcaaccgtaacatttcacttcccattggagagatgagggaattaaggccaggagaagctaagtaacatgtccaaggtctcacacaagccagtatgttaggactagatcccagactcactgaccctgagggtggtgcccttttttctcatctgtctggtctcctgtggccctggcttgagtcctagctgcacttctgttttgcagggatcatggctggttctaaccgctctggggacctgagggatgcccagaagtcaatccccactggcaccatcctggccatcgccaccacctctgctgtctgtatcctgcacagctgtgctgggaccaccctcgggggagggcaagagggagggcagctgaacttgctgccttacctgctggtgcaggaagggtggggagggggaggactgaaccgtggggattctcctttatcctctgctgcagacatcagctccgttgttctgtttggggcctgcattgagggggtcgtcctgcgggacaagtaagataattggggttgatcctattctgggggaggggtgggtatagaaggctgagttctgggaaacagacccatcaggaggtgctgggacctgtgtgaggggcctgtgggagggaggccacggggattgcttgcaaagtcatcttcttatatttcatcttccttctgtcactccagtttgagaagcttggatggtgtctcatttcctttaggataatgatactttccttttctttaaaatggattaattcaatagtgtgtctaacatttactgaatgtccatgtgttggtcacacagacaggagtggtatttatctgtgttccctccgagattctggaggcagcacagataaataacacatggtttttgtactgaaggagctcttcttggtgggtctatactggccaacagactttaagtgcagtcggtaggggtggccatacaggaaagcccaggggcttcagtccagtccttagggatcttcccagggaagtcttctcagaggaggggaggctagaagtgtcttatacactttatctcacttatccttcctgcttttaaggctgagcagagattaggcagcttggaggaagggcattccaggcaatggggagccagggtggaggggagaaatgtgtgcgcatgcctgcagctgtgagtgctcactgtcctggagcactcatgtctgaagggcatgagcacacacaactggccgggtggtgtaggaggtcctctcagaatcactttccactggtaccaccaggcttctgtaagggaatgcagtgggggacgtggggctgggacctatgctggagacaggcctagaggcctggttttcagtatcaggaaattagagaattattttatcaaggaaaaaacaatggaacatttggggctctgcctcccctgtcacccttacagaacttagtcctgtggcaggcacacagttggttctgtagttggtatggagacctgccctggaaatccaggcagcactgctcacctggcatctcctgtccacatcattccaggtttggcgaagctgtgaatggcaacctcgtggtgggcactctggcctggccatctccatgggtaattgtcatcggatccttcttctccacctgtggggctgggctgcagagcctcacgggggccccacgcctgctgcaggccatctcgagggatggcattgtgcccttcctgcaggtcagtgtgggagaagaacagcccaccctcagtagaccagccaggcccctgcccagagagaccacacagtgacccagggccataaccagccttagactacctcctgggccacttctgctctgtactgcactggccaggcctatctggcagggtctgaggcacagggacagggtggtgtggggtgtcaggagttgggcagggcattgggtggtgccctgtctgtggcttctccttcacccagatggaaggataagtgtgtcttacttgggatttggcccatggtcagtgcatcccttggagcactgtctgctcttggggaaaaaataaatggccctgttttggcactgtggttggtcggagacctggggaggcagtcaaagggcaagaaaagggtagcttttaccatggtgctaaaaaaaaaagacggatggagcacagggtcgtggtggcttgctggcttcctgacagctcctctcccatctggtcctctgcagctgctttccccctctagggatcatttgaacttcatggcactggggtgccgatctcagggtgggcaagatgcagcgaaagcctgttatccatttgcattctcctggaggaagagaaatgcatcctctcccttcctcctctttggtgataggattcctgcctctactccactggttcccgaggctaggggagagggctgagaaatccttgaggtctcagtcccatgatgattgctctttccccaggtctttggccatggcaaggccaatggagagccgacctgggccctgctcctgactgcctgcatctgcgagattggcatcctcattgcatccctcgacgaggtggcccccatcctctctatgtgcgtgcctgacttcttgccctcccccctggttcagggtgtttctctatctgaatcctgcagccgttacctgtgacaacccacccagacactttagcaaccccaggaagttccccattggtcatagaagcccatcgtttgttatagagagattcatccacacgtgttattagggtgtgttgtgagggtatttggcttgaaaccccttcctaagcaccacagcatgatctggccacctcctgacttcctgtcccctttccccctttctctgcccatgctgttgtttctgtttctgcctccctttgcatctctgtctcccctggggccttcctgtgttccaggttcttcctgatgtgctacatgtttgtgaatctggcctgtgcagtgcagacgctgctgaggacacccaactggaggccacgctttcgatattaccactggtgggtgctctgtccccacacttccactgagccacttgctcacctccacgccaatcctcatcttactccagtccatcccctctgggtctaaggaccccaaacctgaagaggacatccttttttctccagcttttgttgaccaactcacatgaggaaggtccccgagagggtctcctaacaatcataaataataacatagcagcatcataagcggtctcagctggaatctctctcctgtccgtgatgcccaatagctcacaatgtagcagggaggctggaagtcagctggccagagttcaaatcatgactctgcacttcctagctgtgagatcttgggctgatgatgtagcttctcagaacctcagtttcctcagctgtgaaatgggcatgatagctgcacctgcctgtgggttcttgtgaggactacagtacatggcagatgctcattgcacagaggctgtagttctctcatcattttcctctatggctcttcatcctcacaataggccctcgggggcagacagagcagaaatgatcatgcttgtcctacaaaaggaaactgaggcccaaagagggcaagggaccggcccaaggtcccccagcaagactgtgacacaactgggctagaaccagggctgcccactcctgtctggatgctccggctttgctggtggccttctcctgggaggacccgtttccactcccctgagaccctggcctcagaatgcacctggccaggcctgtctggcagggtctgaggaacagggacagggtggtgtggggtgtcaggagttgggcagggcattgggtagtgccctgtctgtggcttctctttcacccagaagatcccatatccccgtagtcctcatggggatgatggtgtgagttcccctagaccgggctgtcacctcccaggtcttgcccatgccctgccccatctccctcttgctttctaagtcccagcttcagcaacagccctgctggggctcagaggctgggtctccccaccttgtctaggaccctctccttcctgggcatgagcctctgcctggccctcatgttcatctgctcctggtattatgcactggtagccatgctcattgctggactcatctacaagtacattgagtaccgtgggtgagtgtggggagtggaggttggggtggctggggaaggctgaagggtggtgggaaggagagggaaggggtcatgagggattggggtggtgggggtgagatgaagcagggagtgggagaggatggggctggagtagagggagagggtgatatgggatgacattggaagatggggggtgggagcagaggctttgagaaatggacaggaatggtgagagaatggatttagaagtgattttccaaggaaacttagccaaggcttggttgagtctgttggcaggagtgatacacatgtcctttctgagcctgagagatggctctgccctggggtagctggtgcagtgtagatggttctccctgccccctcctggctttctgctctcatgtgatccacttcccggctcccagggcagagaaggagtggggcgatgggatacgaggtctgtctctcagtgcggctcgctatgccctcttacgcctggaggaagggcccccacacaccaagaactggaggttagtggtgagggcacgggtgtgcataagagtgtgtgtgcatgagtgcaaggctcaggagacagggggaagggagcagggcctgacttatcctgcttgctttgttttgctgagtcgtgccctaaaagcccagccttgtctgattccttcccacctgaaacactgaggctgagctgagttccagacatttatgtgggtatgtaaatgtccacataccccaccatgctagcctcctgagcagtcatccattcattcatttcatcatttccatcattttttcataaaacatgaatgcctgatgtatggcaagtccccttctagtctctggggatgtaggaagctcacagttttgtggagaagacacacatggggacagacaaacatcagatcatgtagcatttgctctgagacaggtggaatcgttccctttgagagttataggggctcttaggcatctctagattaatgacaattcatccattttattcacgtgaaaatcagggatgccgagcgcggtggctcatgcctgtaacccaacagtttgggaggctgaggcaggtggatcacttgaggccaggggtttgagacaagcctggacaacatggcgagaccccatctgtgctaaaaatacaaaaattagccaggcatggtggcgtgcacctgtagtcccagctactcaggatactgaggcagaatagcttgaacccaggaggcagaggttatagtgagccgagattgtaccactgcactccagcctgggtgacagagtgagaccctgtctcaaaaaaaaaaagggggaaattggaggtcagagaggatctcacaggtcacagaaggcagacctggagatggaatcctcacaccccacctcttagccctgggtgctgcatgcccaacccctcactcatctccctgtgtttcaccttgccaagagtagagcctgaaaccctgacttaggttagggcattgttgacttgtcttggctgagcccagttgactaaactgggctcccagaacctggggctctatattatttatctgtgaattcccaaatgctcagcacatggtctagcccagagtaggtgcttagagaatgctacgaagttgataggtggttggaggactaagacggctaaatgactaaggaaagggatgcataaatagatgggtagatggataagtttatgtacacgtgggcgggcaaaagcatgaatcgatggatgtaggaatggatgataggtaggtagatgtgtggataattgaatgaataatgcatgtatcagtaaagaaatatgcatatgagtggatgactgaaggataaaataggtgggtgggtggttgaatgggtagataggtgagtgaggtgaatggagaaatgggttgatgggtagatgaatggatgggtggtgaggggtataggtggatgggacagatggttatagaggagagatggctagatgacctggtggtgggtgtatggtgtgtggatggttggttacatggtatatggattatgtgactctgcacactcttcaggccacagctgctggtgctggtgcgtgtggaccaagaccagaatgtggtgcacccccagctgctctcactgacctcccagctgaaggcggggaagggcctgaccatcgtgggctctgtccttgagggcacctttctggaaaatcatccacaggcccagcgggcagaagaggtgagcagaggccctggttgggcttgggaaaaggtcaggacacttaggaagacagtctctatccttttgtactttccttcctcatcaccttcaggatcaaaggaagtgcaggcatttcttttcttttccttagaggaagagcctaagagcctagacagtgagttctttagaattcaactcacagcatgaaagaccatcagaggcagaagggcccattttatggataaggaaactgaggcttagacaagtcaggtcatatgtctaaggacagaaaatgaagattcaaattaggactccttgaactcctactctagactccttcctgccaaagtataaatctttcaaggtgatttcccagctgtggactcttgatccctacagtctggggttgacaaggtgagtatccacatttgatacaggaagaaactgagacccagagagggaaagctgcttgctgaaagtcggaaagctgcttgctgaaagtcagaaagctggtgggaagcaacatcaggatttgaactcaggcccctgctctgtgtcacctgctcttggttccacccactagtccatgcttacagggcagcctacagaaccaatgtgggctgtggtggccagtgtctgccttaagcacacaaagaggtgattggatcccaagggtagtagaggaagtaggttctgtctgagggtcaggcctttctcccatcagggctgtggctagcagtggagagagaaaaagaggcccgaaggagcagaggtgagatggggaggggcaccccgatggcttgcgacagtcgctgcttctgcctcactgggctgttcacactgatctgtcagggcccagagctggaggccttgactggtcagttccattcaacacgcggtggctgagaatgtgcagtgcaccaggcactgggcgaggcacaggggagatggagatgttcaagaccaagtcccagccctcgaggtgctcacaggctggtggggaaggcagagcatacacagaaggctctcagacccaccggatgtcgataaatgctgttagagttaataacatcagggtcgtacaatgtgttgagtgttttcaattcctcaggcaggatactaactaagccctatgtgcatgatgacatgtggttctccctattcctaaacaaggtagcttgtcctgaccccttgggtggttaggtgactcacccaaggtcacacagccaggaggtggcagagataggagttgaacttctatctgtttgacttaggggtggtggttaagagtgtgggggttggagtcagacttccctgacttgaatcctcacagtaacattagctgtgtgtccttaaacaagtcttcctttctccaagcctcagtttccccatctataaaatgggagtaataagactatttccctcatagtacagtttaaatgggagcccttaaaatacttattatgctacttagaaagattgttgaaacaaattgtctggctgtgcagagaagcccagtttaattctggtctgggtgggggtggtatctgaagacggcgacatttgagctgggccagacagggtgtcatgtacaacttggcaggggcttgtgtcagggtgatggtggagagcatgtcgggcaggggggctgtatgagcagtgggagggtggcagaaagtgtggtcagatcatgaagagccttgattgatcaagaaggaatggggcacagagatgatggggagccatgtgccattctggagccagagactgacgtgatcagagctgagcttcaggaagattgggatgaaaggaggggagagatgggagggaaggaggctacaatgggcccagccagggccagggaggcctgaggctggtccttgtcttttccccctcccctagtctatcaggcgcctgatggaggcagagaaggtgaagggcttctgccaggtggtgatctcctccaacttgcgtgatggcgtgtcccatctgatccagtccgggggcctcggggggctgcagcacaacactgtgcttgttggctggccccgcaactggcgccagaaggaagatcatcagacgtggaggaacttcattggtaacgctattgggggctggggacagaagaggggtggggctgggggctgtagaggggtggaactggatttccgctcctttgggcctgaggggtttcccaagcactgcgtgccaagtgtggattcagcatatgcaggtgacagcagtcaaggctggccacgtgccagccactgtgctgggcgctggggactccgctgtgaacgagacagtcttggctcctgcagcgctcacaggccctgggaggaacacagtgcagggcagtgggaagagctacagctctgaagtcacagaggctaggcccacatctcagctctggtccttcctagctgtgtgactgtgcacacgtgactcactccctctgagatcagatttcttggtaatcgtaggtaatagtatatataataactaacgtttctagaatgagttctgtgtgccagcaagttaaggctttctctgattctctcatcagtcctaggagggctacgcattgttatctccatcttttttgatgtgaaactgaggcacagagagattaagaagtttgctccagctgggttcggtggctcacgcctgtaatcccagcactttgggaagccaaggcaggtggatcgcttgcgctcaggagtttgagctgggcaacctggcaaactacagagtaaatgaaaaagaagtttgctccaagtcacaaagtggggagccaggttttgaaccagcccggaggctacactgttagctccaagctattctgtctcctttataggtagatcatggttacaaggtgttgggaggattcagtgtggtcatacatgatgggctcttagtaatcagaaagggcaggtggtgttattgccatttgacaggtggggaaactgaggcctagagaggttgatagacgttcctagatctaaacaataaatatatgatggggcccaagtagatgctggttttctgaccactcagcccatggccaaggccagttggagtggggtggagtgctggctgccaggagcccttgtggctgctgctgggtgttgggagaaccagagtcactgtttccccctctggccctctccttggcctccctcagagctggtccgggaaaccacagctggccacttagccctgctggtcaccaagaacgtttccatgtttcctgggaaccctgagcgcttctctgagggcagcatcgacgtttggtggattgtgcacgatggaggcatgctcatgctgctgcccttcctgctgcggcaccacaaggtgagttgtgtgcgtgagtgtatgcacgtgtgagtgtgtgtatgcatgtatgcatttgtgtgcatatgtgcacaactgcaggtcagactcaggggctctggccagggtcagcttccgtgtccttcctcccctgtaaactcctgggaaagggatctgctgacctacttcattctgagatgttaggaactgatggtttctcctcttgcaggtgcactgctgtaaggagagcaatgcttagcccaagccagtgatgctttctttaatgggggaccctcagacctaagcagggaaggttttgtagagagtggccccaaagacagaggatttggggtctgcatgtatgtgtgaggagtgggtgggaagaggggaagggtgagcggacagggcctggccctggatctcctcatcacatctgggctggacctttctgaatccccttcatcgcctgcaggtctggcggaagtgcaagatgcgtatcttcactgtggcccagatggatgacaatagcatccagatgaagaaggatctgaccacatttctgtatcatttacgcatcactgcggaggtcgaggtggtggagatggtgagtccccaggagacaccgctggggttccacctggccctctttcctcttggccccagcaccaagtagggcaactctaacacccatcagcttatgatgctggatcctttccccctcatccatctcttagcctctcacatattcagccatccctcccttctctataaaagtagccatgtctagtgcttattatatgccaggcactgttctatgcactttatatgtacataaattccaacaacgaccaatgagatagatacaattatcagcatttccatgttacagattaggaatatgaagtgcagagaagtacagtcacgtattcattgcttaacaacagggatatgttctgagaaatgtgttgtgaggtgattttgttgtgtgaacatcatagagtgtatttatgcacacctagctggtacagcctactacacacaaaggcttattgctcttatgctacagacttatacagcatgttactctactgagtactgtaggcaatggcaacacagtgggaagtatttgtgtgtctaaacatatctaaacatagaaaaaatacagcaaaaatacagtaatcttaagggaacaccattttatgtgcagtctgccattgacgcacatacaatggtgttatttggcatatgactgtaatttgcccaataacacagagtacctggtggaggcaggattcaaacccaggcaggctggctctagagcgtgtgcccctggtgattatcctgtagagcatcttgtccaaccatcctctcaattcatgtgtccatccacccatccctctgtgttttcattaatctacccatgtattcattgaagtattcattcactcactctcccattcattcttgcatgtattcattcatcgctttgttctttttcttctttcccttctccattcacccaggtgattaattaatccactcattcattagttcatccattcatatgcctggtcctgtgctgggctgaggagggaatgagctgcctgccttgcaagagcattgccctctctgctacgtccttgcctcctacaacccttgacaaaattaatgattgggtagggaagccctaggctgccagaaggacgggggccttccttccttcccttggcctttcacctgggctcagacctcatgctttcctccgtgttcctctccccaccccccaaccccaacctctgtctgcccacagcatgagagcgacatctcagcttacacctatgagaagacgttggtgatggagcagcgttcccagatcctcaaacagatgcatttaaccaagaatgagcgggagcgggaggtgaggttgccctggctggcccctgagagcctcaaactgctgccagttctgggtggcaggtttaggatgcctcagggctgacactcctggcatttcaacttcaccctcatctccctgattcccccaaccacacctcctgaaactgatctcccagacagcaggagtatacactgcagcttcactgccaacctcccagccaggaggcagagggactttggtatgggtgacagatcttctcctctgtatgtgacttctggagcctgagagagaagagtggatgctaaatacgtatggatgatgagtccttaggggtgtgggctgccagtgtgagggataagggctcatgtagaaacccttagagagtgggtaacagatgggtgtttagagatataactgatgtgtgggagttaggggaaaatcccctagggtgtgattgatgggatctcaggggtaatggtgataagcccccccatagggtgtgggtgtaagatcttctaggtgtgggtgatgtagaaccaccagagtatggatgaaagacccacccaagggagtggagtccttgggaaaatgagtggtgttaccccagctggggacagaagggctcctggaggtgggtgataagttgcccagggaatgggtggcaatcctacacatgagggtaatagaaccatgggttttgagtctcccaggggtgggtaatgtatttatcagaatgtggttgatggattctcagggggatgagtgatgggtaccactttgagatgggaaggatggatcctccaaggctgggagtgttatccaagggaggtagtaaaaatggtaaaacatggcatggtcactgaccagtggactgaggactgacattggaccatagtgctaggcagagccttgctgtgccaaggttaacccttttgttgccagatgaggtctggggttctggagaggaggtggggcaggcagatcagtggtgcagtagctatttggtctcaaatcatagcaatattttaacaactggtacagttccagaaagtgcatcctggctgaacatcatctctggtgatagctctttgcagggcatgggtggtgactcccagcagagctggcaccaacctatgtcactccctagatccagagtatcacagatgagtcacgaggctcaatccggagaaagaatccagccaacacgcggctccgcctgaacgtcccagaagagacggctggtgacagtgaagagaagccagaggaggaggtgtgcagcttgggtggtttggccccaaccagtgggagcagagcccttggcctccaaaggactcaactgccatcgcttcattcatccctcaggtgcagctgatccacgatcagagtgctcccagctgccccagcagctccccgtccccaggggaggagcctgagggggaaggggagacagatccggagaaggtgcatctcacctggaccaaggacaagtcggtggcagagaagaataagggccccagtcctgtctcctctgagggcatcaaggacttcttcagcatgaagccgtacgggcctgggggctaagggctgggggctggggtgagctaaagggtcttgctccccatggcagagcaagagagcagaaggcatcctggtctgtcagcctgcagacccagctcagacattgtcttggtttctccatctgaggacttagggggttgggccccattgctaagtctcagaattcccagttgcaggcagcggaaaggtgaagggtgtgggggctggcagagcaggactcagggcagatgaccatggcccaagcccccagtgtcttcctctttttctgactctgctctttttctttctctctttgcatctcttgtgtttcctgaagggagtgggagaacttgtaagtgcttcagcattttttcattctctctcctaggatggccagggtccctaccctcctcactctgttgtgaacccctaattggtgccacgacctctgggatctctgaatagcctagcctggagatgtttaggattggtggtcctaggcttgcaagaaccagtccccagcagcccagttcgggctggaagggcgactggctccaatcttctctacccccccggctcacgcggtctccactcctccttcctgccgcaggaaccagtccaacgtgcggcgcatgcacacggccgtgcggctgaacgaggtcatcgtgaagaaatcccgggacgccaagcttgttttgctcaacatgcctgggcctccccgcaaccgcaatggtgatgaaaactgtatcctggaattaaaattgggggaaagagggaggtggacgtcagggaatctgggtcctgtccctgggatggaagagctgagctgttcctgcctccggatcagcacctcggacagggacacgggcgcgagaggtcccctggcagccgagcgcgaccccaatttcgtcgggagggaaggagaccgggtctttctccttgaccggctctcagacatggagtttctcgaggtcctcacagagcacctggaccgggtgatgctggtccgcggcggcggccgcgaggtcatcaccatctactcctgagaaccaggacctgccacccgggcccgagcgcgcccggcccgcggctccggagccctcgccgcgccccccgccgctgtcaccgtttacatacagaccctgtgcccgtgtcctggccccttaccccgctgcctgaagcccggaggccacgcctgttggggctgattcggagagggcgccccgccgcgcagagaccagagctcctcagtgccagtttggcccctgggtcttcgctgccctttttctaagcccggcctcgtctcgccggaggagacgctgcaataaaggttgggagaaggcgcggaaaggagaggagctggggccttggggacccccaggtagtccatgcggcccattcctccccttcccactcccgccgcggtcctcgctctgcgctcctccggcgctgctccctggctcccggcggcccggaggcccgcggggtgggaaggccgcgcttgccgtctccgccgccccttctcgccgagccgtggggcgcgggcggccgagcctatacatagtgtacaggagacatcgcgtgtatttttaacgtccccatatttatgtgactagaagcgcaacagacttctcgccatagtcgagctctcccgctgggggcactgcggggaggcgaggcctcgggaagctgaattttccttgacgtccaagagtttgagagcgaaagtgctttaggcccaggcgggggtcgtggcctcgttccctcgacacctccgtcctgctctcgcctcttcgccctttccgcgcgcccttggcttcccaccctcctctccagtccttttccgagatgaggtgagacaagggtccaacttttcctggattcgcctcccagcggacgtgagcttccactgcggctgcagagacgcgagcaacctcttctcatcggctcttatgcaagttggggccaggataggggaggggtgctcctcaagaggaagaaaccgagaggcccgcgccccaccgaggaagccccgccccggtgccttcgctggggagcaggcgtctctcctcagtcggcttgtcgcctgctccccgtatcccatggctcctcgccaaagactgaaattgtggagctggagggcgccccctccccggagtttcctccctgggacaagtgagggaggagggggccgattctggtttaggggccggacccactgagaggccccagagccgcccgtgatgttcctcccccgtccccatctggcagctcctgtctcgcctgagggacccagccgccttctccgtgctctggggccgggcctcgctgcttagcagcggcctctagctccgtctcccggggacctgggcctgagggagggctggagtcgcacgcgctttgtccttagcgcctgtctgctctcctctaactaggacccagggcctttggcttccccagctcatccttggcccttccgctccaccagcctggtctgaggcgtgctctgtccttagagaaggcgcggtggccgggttcccttcccctagggcacattactaagggggtcaggcactgcatgctcgttccagcaccatctgggactgggtacagtacctccagccccagggccctgacctgcgcacctagcttgacatctcacgcacctcccagagctggcgccactgagtaatccggacctcaccacctcttttcctttgagcccaaggcagagctggagctggcgccacccagacagcgtcaggtgtggctggggtaggtttggaggtctgccagttacaccaagtcccctctgagattcgatcaggggactggatagattctttcaggtactcaatcaggaagctggaggtgttagacaccagccccctgcatccttcagtagacctccctctgaacaccacagccaggtcctgccttctgggggcctgaatattccagagctgatgtgatgggctgtgcagaagggggctgtatcaacatcaattagggaaccaaagttgcactatctgggcccagattgtctggttggcaagagcaaagtttccgttgatgaaacagacatcccacaacaaaaacccaagttttctgtgctacatgtgcaatatttgttatgaatgttatcacaagtcattcatcaagttatctttataatcactgtagttagatgtttcatgtccattcaagtgacttttattctgagtgcaatatttcaatagccttgtagtgataactagtgttgcttttgttttagatgatctatgtgcagggcaatgcaatgaagttgaaaacccttgtaaataggagaggttgcaaaccaaatcaagagtatttattactattactgctattattattaggcctgcctttaattttcagtgtaagtgttcagtatgccgcatcctgcctcagtattgatcttgtgttctttgtgccaatatgaaaaggagagggttggttctttcctttattgttgaatgctcccatttaatgctttatggcttttactgtgttacttttttagactcccgtctgcacaaaatgcaataaaaataattttattatacccttcatggcctgagatgtgctgtttggacactccagggggccctccaggaggaccccacactcttaaatcagaaacactgaccaccgacagaagagatgggctaatggcccaggtctggtgatctaatttatccaccgatagctccagggccctggcctggagagcagcactatcatctcctaagagactggcaggcacttactaggtgtcaggctgcactggcatcttctaggaggtagtgagcactttctaagtgtaggtgtcaggctgcactgatacccccaggaggcagtgaacacttaactggtgaggctcagtgctcttggcacgttggtccctaactcactggaggcctgtgccacccacttcaccacacccaccccaagttattaaatgctcttcaaggctccttcaggttctatgaattctgccaactccctgcacaatgggtagaacagagggtggcaactgagacaaaatgaaaacaggaagtgcccccctaccaatggccattaaccacaaatggcctcctcacatcctgttttcctttcctagaataagaggacaaggctgctgacacaatgaatgtctaccagaagcaggatgttgaacacagcactataattagccaacaggcctttgctctgaactgttattaaagcctctaagtgagctacctatgaagagaaggcagggttcaaagaggtttgaggccggatcatatgctgaggacaaaagggggcagaccagagtcctcgagacaggagccctcacctctgacttggggaaagcatcctgcaaagagcatattcacacccaaaaaagatgaacaaagcttttacttttttcattttaattaaaaagtaatcatttcattttattaacaacacaagagttccaaagaggaaaaaaaaaaccactatataacacaaacaggtcagaacataaaatgctgccatttggggaccttgaattttgaaaccattgtttgcttaaccactggcagggactcagctgaagtcgctgctctccctcacccctgctagaggacctcaagactgtgatccacagggctctactgagcacaaaccctggggagagggcagcttcctggggctccatttagaaccacagccagaaaccctccttctaacaatttcactctggtacaaaagtcgcgaacagccacccatctcgagaacatgtccagctaccagaagtctgacatcaaagtggtccctacctcctgctgctcaggaaacagaataagagtctagacaaaaacaagagcctggggttttgagccaaaagcccaaaacaaatcactgaagaaacgggtgttcacggccagagtctcagaaccaacttcatggaagtgctgctggagagggggatgctgacagaactggttaacagggaagagtggtggggcccagattcacagtttgtggtaactgctgctgactggagctgttcagtccattggagatcttccaatgaaatgaaaacaaaaaagaaaagagaaaaaaacaaaaaacaaccttggctcagagagaaaaattcttttttctgtggctgccatggccattcctcaacaatccagagtggctgatttatgaatcctcaagcagaccccaaacatatggggtgagggtatgatgacactgtgcctgccaaggccagtttgcttttcttcaactctaggcaggagttgcaggcaggagcttgagctctggtcaatgtgtatgaagctggaaagccttggtaggttcacaatgaacaaaggtggtggctactgacatgacaaatgccattccaaacttggctagctgggcctggctccaaatccagtagaaacagggaccggagaaaccccatcaaatacaagcccagacacctgtactgcccccggagatatttattttctacaaaacaaaaaacaaaaaaagatacagccccaaatgcagtataaactttgtaaggaataagcaacacagccttgggcagaagagagagcaggtggtagaaattgatgacactcgatgccggcctgggagcgcagagaacatcctccaaacagctctatttagaacaagtaagtgggaggaggccaggggatgaggggactggggagagttgaaagatttagcttcagtaatgcctctggtaagatcccatgggggcctgtggctgccccatctgtgctgtggtctggctaaccaggtgggagagagcagggccactctggatcagggtatccagagccttctgtacacttggattgtcaaagttgatacctgtggaagacacaggcctctggctagtcatgttgctagcaggtgccaggcgactggaaggctggccaaaaagcccttgggaaggagccccaggtctggggcccatgttctgagcagatcctccctgtcccaaaatgcttggaggctgattgccagaagcctgtgatctttgttgaggctggctgtttgctgctgtggaaaaattctggtttggggtgtttccggcagcaaccgagggggatgcagagctgctattggccgtcactgtgccactattgaagaggctgaggattttggcctgaagctcttgctgggaggtggggggtgcagatggagtgggtgtagcagaggggagcacttggccgctctggagcggttgggagcttggctgtgtcttcagcgaggcacccgaggtcgccccgagtggttggcgggaaatcgggcctggaagacagaagagggaggtatctggttcaaagtaccccccaagggcaggaggcctagcagccaaaggaagaacaacaatcactgagtcacatcaatcatacagtacacagacgataacatcaatttcccaaagaggccgcttcatgatatgtgctgtttacagaaaacaataggctagttcccctagagaactgctaaaaaacaaaagggcatccatcctggctaccacggagccagcaatactagtcaatccaccacattaactatagggatcagcattcagtacccaaatataaagttattattaacattatatcagcatgggtggcccacgggagaacccaagggatggacttagttcccttacccactccaaagagccctgggcctgacaccctcccaacagagcctggggattagagaaatgcagagtcagaacttcacctcggccctgccacgtagctcaccaggcagagagtcggtgctgctcctcatcagccgctccttccgctctcgcaggtagttgatgatcttgtcagtctcttcagcagtgaggtacctgttgtctgccagcaggttgatgaggctctggatggctggagggtggcccccacgcactccctcctcagggcctcctctctctctttcctgcaggatggcttcatcggccatcttggctgcctgtctggcaatctcctcacgttccttctcccggcactcattcttgtaacgctcataatttctggccaccagcaccatggcatctgcttggggcatgttgcgatgctctgtaggaggaaatgacatgagttattttcttccatgacatatttaagtgcccacctgctgcactctgtcaagtctttcctaacctcataccagcaagaaaatcattttggtgacaaaaagccttgagattgagagtggggtggtgtggggggagagatgaaggccaggaagggaagtgaacgaacacttttggtgaggagatgcacctttatatacagctggttctttgggggaattcctagatcacagacttgtagtaaaaaccaaagaaacatgacatcctcccacagattcaaacagaccacgtggggaacagccatgggaggcaggcccaacagcctctagaccagcagcaggaggccaacaggcccctctggaaagcagggctctccactgtgctcctcaggacagagctggcctaccattttttaattcatcagttcaaaagtcatagattaagatcaaactgtgaccctaaataacctcctctcctcacccatgggcaacatggtttactgggtagtgagaggactccttagaacttttgtcctcacacatcttgaggactattcctcagacaaatgacccactggagatccttatgtaattgtatggttatgagggtaatgggtgaggcaaagagagatcctgcgtatagtgggaaaagggttaagtctgtgctgtaagagtgaggagcagggtatcagctggcggactcttaatcctctgggctcaatgcattaaaagctacttctgaggaggacttcgagaactgggcctgggcctctacagggtcacggcctcttagcccctctggttacttctccagcacacttacaaaaaggaccctaaatgcctgttatattctctgtcctccattagaaagctggcagaagcaaggattttgtcacattcagtggagtacatggcagaggtgtgctggagccagatctcagtggcaagagccaactgtgtacatttctttccaactctcccttcagtgacttcaggttggtggcttgaactgaaacatggtgggagtatttacaccatggagatcagcaaatgctataaacgccctccccccacactggaacttgttgttacacgtgtgccagcacaccactgtatatacctagtggctaagtatagtgtaacagagatccactaagaaactatcagataagtaagtgactatgcaagactcttccatggtacttaagagaggggccctaccatatatgaactgagatataagagtcatttgcccaaaacctgcttcttctgagtaaggcataaaggactaataatggactagtgactacctccggtattctgactctgtaccttgcggggttccaaacatgatgttgactgtgcaggagcggtgaatctggtgttgctgggtgatgacaatagcaaaaggagaacctcccctgctaacatcctccaaggcttgtgacagtgacacttctgtgttaaggaagatcaagtccactaccatgcccaggtctcgcaccttccgccccacagactcagcatagtctctgtaaaaataaataagatccaggtgagcgaccaactccaaatctgcatcgtgtgtctcaagccagttgtgtgtgttcctactgataactcaaaccttagtctaccccagtaccgtattcaggatccaagtatctagaccaatactctctctctaccctggctcagaacggttgtgacttgcttgagatcacgtcagaagttgccagtagcacagtatgatacccaggtccttctcttgattctctagccctgtggtccttccttaagaccatcctgctccctaagacttgtggcacttatctctttttgggtaggctgcacaacacagtgggaagatcatgggtttaacgctagaaacatgggtttggatcccagcccttaaaatttatttgcaaagttgtgaagcttaagcaagtccatttacctcttacaaacatcagtttctttactaataaaacaggagtaacatggctcagttcatacgtcatttttttgaccttccctccaatctaaattagatctctgacattctcttctcataggactcatcacctgtatgcttttgtcacctgccccattgggtgtaagctccaccagtggaatgaggctatacagccccaatacccgccatccaccatacgtataaaagatttgctgaatgctcattttttatgattactgtgaagattaaaaataatttatgtaaggcacctagtatggggtagtacataaagtaggtgctcagaaaataacagctattatcatgtgtccaaaaaaagctctctagagttaaaagcagcatctatcactgaacaagacagccaagagcctgtgaactctgcctactgcttggtgtctcaacacctatttccctagtcactgccttgaaattagctctttaaccccaaactgctagaaaatacatgaagttatttacttagtaccacctagggaaagggaacatagctactgccaagcctgcaagctgctatactcctttctgcttctctgctctgcctcttcaaggagaaaatgtaaaacagggatgcagtgaaacaatgctataagccctagcttggtaacatggtcatgtaacagttctgcaaggccatggtacttcacaaagacttggttcttggctgacaaatgcagaggcgtgtctcccaaagtattgggcatttgggttgtcccatgaagggagtatatactactctgcttgaccagcggctacaccctcttccactctcagtctgcatggttccacagggctaatcccacctctagctcttgggatgggaacatgacttagccctggccaatcagaacacccagcacccctgccaaagtgacaggctcagggatgggaaagtgagtcaggtcaatctaaaaagaactgcagaacttcaggtggaaacactgggaaagagaagttctctttccacttggcttgctaagctaagaagacacacgttcagggccagtgccattctgcctcttcaagcacaaaacctgcctgagaacaaaggcaaatctgaggaaaacagtgcttagagactaacacagagaccaattttgatgacatggtttgatcctggatgtggctgtgcctcaatttcccagttaatttttgcttaaatgaaaaatgtcccttttggcctcaatttgaattgagttttctgtcacctataactgaaagaaccctggctaacagcgcacagcaatgcaagaatacacagctcagattcagtggatagaggtgctaaacaggagcctgaatttctctgactcttctccttactggggagaaatatctaagggttcttactttgtctgtttgttgaccacaatcacagaacaatcaacgggcctttcggcatcaaagcgtctctggatttcctcaaaatattgacgataaagctcttctctacgccgttcctcacgtttcaaacgctctgcaaaacaccaccagggtaaactgaaataaggactggaccctcattttaaatcctgagctacttgtaggcaaaggtcataatactctgaatcaatcctctggtctatctcctaaaaacagccagtattaatattttttactattataaattaaccaaaatgtaatgctggattaaaggacgtggccattttaatgctgcatctgatacttactgccaagctgctccctgagaaggctgatactaatttatacctccacagaggtagatcatctagtgcctatttctccacaccttagtcaacagtgagtactgtcattctttttaagtcttgccaacttgacagataagaatattattattattctaatctgcatttttgctttttttttggggaaaaaatcaagtagtaaagtttaaaattaaaaatttaaaagttctttttttaaaagaaaaaaatcaagtataaagtttaaaattaaaaaattaaaattaaaaatgagattcttaaagatttcaacttggccaggtatgaaataatttaagaacctttaaagatgtattgagaaaaaccaggctttaaaaagacatgtttgccttcatctaaaaaagagatgctgttaggtaaaagttataaaaaaaaccaaaaacctattttgcctagataatgcagatagtcagtcatagttacttggtcagtaggcaaaaaacaagcacttaatgtcttcagctccaatcttttgttcatttttctcttttttttttttgagacagggtctcactctgtcacccaggctggagtgcagtggcacaatcatggcttgctgagacctcaacatcctaggctccagcgatcctcctgcctcagccccccgagtagctgggactacaggtgtgcaccactgcaccaagacaatttttgtatttttttttgtagagatggggttttatcatgttgcttaagctggtcttgaactcctgggctcaagtgatctgccggccttggccttccaaagtgctaggattacaggtggtggccacagtgaccagcattttgttcatttcttattgctggaatttcatatttatttcttcttgttggatgactaaaccagatgatggtactaatttgcatcttaaaaatcattttcaagccaaatgctctttacccactaataagctacttatatttcttctttttatacactgcttggccaaggcactagccctttttcagatgggggtactggttattagtttcctctctcttttgtaaagtgttctatcaataataggaatagactgtttcagctactttaccttttgcacgagactgactttctgggcctggagggccccgtccatcaaagctatctctgtaacggtcaaaataagagtcatcctttctcctgcaatagtcatccattcgtaggtatcggtcataagagccttctctcctgaaaagttaaggaaattttcataaagataaaactgtgtcttatcctgaaaaagtcacctagagaattctctgggattagacaaatgaggtttatatctgggactcactgcattatcagctctgtggctgtgatagagttaacctgtctcactgagatgatgtacagaaagcacttagcatggtctttggcatatattaaatgcaaaataactggcaggaattattgatactagttttgaggaaacattacatgtccctcccttgtgctttttaaaattatatctaaacgcatataacaataatttgccattttaacaatttttattattattattattttttttttagtagagatggagttttgccatgttgcctaggttggtcttgaactcttgagctcaggcaatccaatccgcccacctcggcctcccaaagtgctgggattacaggcgtgagccactgcgcctggcctaacaatttttaagtatacaattcagtggcattatattcacaatgctgtgcaaccatcaccattatctaaaatttttcatcacctcaaacataaattctgtattcgtgaaataactcccctctccccagccactggtaatctttaatctattttctgtctctataaatttgcgtattcttgatatttcacataaagtgaaatcatacaatatttgtcttatgtctggcttatttcacttagcataatgttttcaacgtccttcatgctgtaccacagatcagaatttcatttcattttatggctgaatgataccacattatatgaatacaccacttaaaaacaaatccacacagtggcttacacctgtaatctcagcactttgggaagccaaggcgggaggataccttgagctcaggagttcaagaccagcctgggcaacacagtgagactccacgtctatacaaaaaaattagccaggtgtggcggcatatgcctgtagtcccagttacttgagaggctgaggtgggagaagtacttaagcctgggaggtcaaggctgcagtgagctgtgatcatgccactgcactccagcctgggaaacagaatgacaccttgtctcaaagaaaaaaaaaaaaaatccattaatctgctgatagacatctggagtgtttttaccttttggttattgtgaatagtactgctatgcatattcatgtacaactgagtccctcttttcaattgttttgagtgtatactcaggagcggaactgatagatcatatggtaattctatgtttaactttttaaggaactgccaaactgttttccatagtggctataccaatttgcattcctacctacaatttctcagagtttcaatttctccatacctttccaacactgttattttctgttaaaaatgttgaaaatcattcatacattcagcaaaatttattgagcagcagcacatctatcacttgacagtcaccagaaataaaaggctgataaaatgactgctcttacagagctttcaattagtttagcagaacatacataaaaagaactcaggaaaaaacaagcagagtaactacgtatgtacctgtacataggatctcgggagtctctcatgtctctgtatctgtcgtacatggggtctcgctgatctcgaaaatccctagagtctcttagatcacgaaagtctctaagatccctcacgtcccgaacgtcgcgcacactcctgctgtctctgtgatcccgcaaatctctactatgtctgtggtcccgcaagtctcgggggtctcgaatgtctctgctgtcccgggcatcccggccatttctgccatccctgggctctctccttggacttcctcgaattggggatcgatcacgccttgaatctcgactgtctccaaagccatatggatccctgtgggaggtagcaagaaaatgctaagacaaagaaattgaaagtagccaacccatcagctcttcatatgagaaaacccccaccctccaagcattcttctctaaaacagggcagccaaacagaacatgactcaacatttaaggccagtcatccatctggtcagcaaatagtctagaggttccacaatctcaaaagattaggacatcaaaagaatgcatgaccaaaaactgaaggttttgactggataacagtattcatcaggctttcaaagtgaaagtgtctttccaccagacttgcttgaaagagactttacaaggggtaaaaagttggagtgacagagtaaggaggcaagactcatgaagaaaaaaagagcgaatggcacaatcttataaaagtgatcaaaggaactgtccttaaagtacggaaaatgcacttgaagtatcttggcaggataataaaattaaggggaaaaaattactataagatacatacagtaaaggaccaagaacaatctgtttctctgttttgtcagggctattgagtattggtatctctcaatctgagggtttacgtagaagctgattccattttgctcaagatggtttaaaaaaaaaaaaaagagaacaaaacaaaacaaaaaaacaacctgaacagtgaagtcacagatatgctttgtctgctctgactcaatgttcttcatgagacgtttcaacccactggaaactcctcttcaacatatttaaaattaaaaacttcttaccccaaccccatcagtcccattccccacttttccacttttgacaaaatcatctttccacttatcaagttttaagttcttgaatattaactatgctttttcttcccccatcccaataaagtcacttgtgtcccgttcactttttctttccattcccattggatttgtaagtccaatccaagcccttatttctattctgacaccaacaggtttccaaaacacaaaattaaaaatcaacctacttgctttcaattcattcaacacataaatacactaactatcctaaaatgccaacttctatgttagaaagcctaataaatctgacagctattatctccctctcatttctaattcaacctcctcagttctacttaattcttataactcacaagatataatctatctcaatagttttatttatttgatttctatacttggaatatttttcctgcactaatccaagtaccatccaatccacacaggcaagttcgtgtcccatgtcttccaagaaaccttccctacccttcctaactgctgatctcttctgctcagctcagggcactttctatctgtattactcatcttgatctggcatttacccttttacaacaatgtcttatgtctgacccgctttaaggattaccttctccgtaaaacctgccctgaactcttgatcttccccaacaaccatgctcctcctccagtccttcccatctcagtaaatggcacatccaactactcagttactcaagccacgaaactggatgtcatctttcccttaaagcctcatcctcccttccaaccacatttccaaattttctccattctttctcagttctgcccactttcctttaccttctttggcaaaactgaaggccagcgcataatcatctcaccctcaaaccacagcaagagccttctaaagcagtctcctcatttctgtttttgcctctttccaaatctttctccagaaagatcactctacagtgatctgttacgtatgtaaagcccttccctggtttcccacagtatgtatttatttttatagggatgagatctcacctatgctgcccaggctggagtgcagtggctattcacaggtgggatcacggaacactacagccttgaactcctgggctcaagtgatcctcctgcctcagcctaccaagtagctggaactacagatgtgtgccactgtgccaggctcccacagtatttagaattcaatctacaacctctaccaatgccatgaaggtcctgtataatcttggctcctgtcttctctaaccctgtcacaccctctccctagttcaccactctttgccacaccggcctttcagctctgcctagccaacgtctttcctgatccctttacgtgagtagcaggaagagatctatactcctcttccaggtctcagcatataaatatcccctactccctgattgttagattcaatcaaagtttactttctgcccctaaaattctctcatagcactgttttcacttttgtcatttatcacaaattgacattacatatttacttaatgtctgtctgccctactagactacaagtgccacaaggacaagaactatgtcactttgattctgcactacaaacccactatgtagaacaatgtctgttatacgacagatgctctatatgtatgttgaatgaatcttgctccagtacaaacttctataaccgcacttaccacactgttctgtaattgtttacgtggcttccctaccaaataagaagttctcttgaaggctttgtagctctaggatacaccataggagttcagtaaatgtttaatgaattgaattattctactaaactgtaagcctctcaagagcaggcagcatgttttgctcatacttttgtcgtctaccatggttacacacgttaggtattcatcatgatgtcatcagcttgtggaaaacctcacctcagctacacgggcacagcaaaaacaatttaaatgccaattttgcttccatgaaaaatatttgttatatattctaaggttcaccagcattcctgacttgtgagagcaaacatatcatagaccagggactttaaatgagaatagctaagcattatttttcttattagaataaagtaaagactaaccaagattcttacttcaaccttccttattacatcatataatcttcctaacatgtaacatctgatgtagcatgtaatgtgggcaaacactcaagatccaaagagaaaggacaactgcaaagtatttttggattaatgatcggcagataaacctgccttggggagcagttagaagtagtcattagaggtggaatccaatttcaagtgttcttggcaatcagggctgagatatcatgatcctgacagaccacagaccacacacaaagccttgggctggtggaaatcggggtggggcatgtcatagcatgttatttaccaccttcggagtattataagtgttatgttatgattggtcctcattcttttgaatccactgaaaaaccttacttacctgtcaaagtccatccctgcaagttgactaaaactctagattcgcaaagtctgggttcaatcttccagtctgagagggcaagccccaccctttccctcaaataatttgaagtccatgtgcaacaaaactactaattccctctcaagtgccttcagggtaaaaatgtagaagaggtgatattcacaaaaggaaaaagaaccaaaggcatggtggaagtagggacaaagaagataataattttctcaaaaggaaaggcaaagccttttttcctttctccaaaagataaacactatggtagactgctgttcttctggagacgaaaacaaaacaaaaaaccctttagggttgctttaggacccaaacaaagaactcctcagaacaaaagggctcctgctgctggccccaacatatttttcaaaacaagactacagctaacaaaagggcagtagtatgcacgaatcaaagtgcaagaagacaaagcttcctgtgggagacgctggacctcagatgataagtgggttagaatcaggtttctggagcataataaggttaacaatatcatcccacagcaccagaggtgttttactaaaggaaccaaatgcagcataccctcaggtactacatcactagaggataaaaagaaactgaacagtggttaaatttcagcactggagtccacaaactgaaggcaggtggcaaacacaactaaaattctgctgtaaattcctcatctattcaggagggggaaaaaggcaaatactctttgccttgaggggaatatagtcacactgctgggaaacatttgagacgtaagggcgaaaggggtgaaggggaaaacaatggctctggtggcaagtgatgagcttctggtagaatgtgtctcttcctgaggactaaaggggtgtgcagagcaccaggcatgtgacagcctacagagtaagaactgatagatgatcatcttggaaaactgtgatggactttgaatttctctttggcaagagactgaaacttcacatccaagatggttttctttggctttggttctacagacggtcagggaggaagacccctgtctttttctttcttttctgcaaaggtcagcatctcctttcttcctttctgttcaccggaatgtcttccttgggagggccagcctctttctgaccctgaaaaatccttcattagctcttcaaacttctgtcacagatatactgtccacaaatatcatcatctaaatggctggctgctgtatgatgttgatcctccaccaggagggcttcatgctactgttagaaatggagacaacagacttgtccagaatattgccattaggtggaggtaggatatggacgtgcaatgagatatcacacctcacagacccaaattttacacatgtccatgcttttccttaggaagcactgacaaccttctccagcacaaacagaactttcttattggtagaggtggcagctgctgagaactgatgacttcttcaagtgttactgcagaggtaatcacaacctggaatttctttgtggcccacctagagcaagggctgtctcacaaccagggagcaagcaataatcaaaagcattagggccctgtggataagcagaaagcatttcaggtcatataagaaacttgtctacagccaggttatttctgatgagccgatacccaatgactttcaccaaagagataccaggtttaacatctttcacaaatatatggggaaaaatcctctgcagagcgttggatgcagacaagttaattctatttgttcttctttaagtcattcagaagtacagtcttacttcttgtacctagaggccacatctgcataaagatatgctacaagatctggactgtcaaggtgttgagctgaagatggtaactgagatatctaaggcacaactggaatcatgatcctgtctttgaagaaggactaatgcttagtatcgatgcttgacaacttgcatggtaactatgcaaggtactcacaggagttcaatgaagtggccctcaagagttagatgataagaattcaggctgaaatgtgatccagagcagagattcctcatgcagagttctgtgcttggctgggccaatattgtcagaattacacactgacagctggagtcatcagggagtcatattattgaatagagagcaaagccagcagaactgtggtttactgaaacatctgaagaggtgataatcctgtaaaactcccaaagatacctacgttaagtccagcaaaacaaggtgttataaaggtcttgccagtatgcttataccaatattcttattaaacgtagaaagcgctaaaaatgtagaggtataactttaggaaatatttgccataggtagtgttttttttcccctgtgaatgatgcaccccctgtggctgggggcatacaaaatgattagggctgccaaataaaggcagtttgttgttgtcaactattgatacatttggagttatctcaaggctttgactggaagcatgcacccaaaggaggtacccagtgttcaccctcagttaaatgatttgccccttccagattaattacttgcccgtctcacctactctttgcaatttatgtctgccctattggtatatcttaagagataaagtatgatcaggacaatgattaaaatgttagtgctcgctattttgaatacaatgttaaacctgtctttttttttaaggtaaaaaactgggattttgaatacaatgttaaatttgtctttttttttttttaaggtaaaaaactgggactcttagttcggtttttagatggggttactaatggtgaccatcattcttccctgaagcaaataaacatgactgtatggaacttcatcatgttaaataacatgctgaggaacccagctagggaaatatcaccaaggggaagatggattgttaatggaatttgaattagcctagctgtccctcctgttgattgtaaataaagcaggaagtcactgccctatccacaccaccaaatgacctcattttacaattgatttctgaggaaggtgatattttaaaaggcatacaaaggtgacctgtatatttatatagttggtaaggagctcattttattttttgagacagggactcactctgttgcccaggctgaagtgcagtggtgtgatcacggctcactgcagcctcaaccccctgcactcaagtgattctcccgcttcaatgcctccccagtagctgggagtacaggcaagagccatgacgcccggctatttttttgtagagatggggttttgccatgttgcccaggccggtctcaaactcctgagctcaagtgatccgcccacctcgtcctcccaaagtgctgggatcacaggtgtgggccactgtgcctggctagaagctcattttataaggccctctccagtgctgtctgtatgtttgtttgtgcggggactattatttaaaaaaagcataaaactatttctagattggggtaaattaatatttttaatttaatgctctggcaacggctattactgggtttcaaccagggaagttggtcattccccaacactgcaatgtttgttgaatatctacaatcaactagaaatgttaaaagcatttggttaagtatcattaacaggatgatataaaatacccttctcaatccataacagaaacaggatctattctctattctgcaatgtggcttatttgttgttgttgtttttgcctgcagaaacacacagacattatccagagatcaccaagtatcatggagacaacagagaggggtaggattttactagcggagtcagtgtcttttatagttacaaattccacactcctggtaagtcaccaggaaacacacacgttagcgctctttggaaattggatacacaccttatctcctttcaagccacctggcaactaaagattccaatgggaaccctgtacttctgaagattagatgcaactcttatccacctgtattccattctgtgctgggacaataaggagcaacacagataggactgcccaagatctgtggcatggttagatgaaggctaatgaaagcagacattatacggaactgctgaagttctgcaggatttgtttatgttcttcaggatactcacacatacacacaaatcaaccaacagagtatttacctgcaagctgcaagcattctttagagagaacagacagaataccaatttacatgcccacttccgcagtgaaaccaacgaatggccagggaatccacacgacagctgtggtatatagctgtagctatggtattggattcaactctgctgcacaggcagagtggacaaagactccaactgaatgaaaccagcagcattacttgcccttagggtctgcttaaactgcagagtgggcatgcgtaatctattcccggtagctagaacttcacatccaagtaggagtatatacatgaaacacacagtggacattctttcatataagcaggtaacaaaatacaggtgtttttgtccaaaagcaggacagctgtatgttatgcgtaatgctcagttagttgggttcacaaggtgaccagtggagctaccagtacagacgaggattcactgtatgcagcactgtccagttcactgtaggaaatgcagtttactgtggtacgtagtttagttatgtttctggggaaaactggcttttttacttagaggcaaggcaaaatcaattaatccatttgggccttgaagagacaccagatatgaaatatatcattcgtatgaaatatatcatatctgtctgccctctacacaaaactgcatccacttgtgtgctgttatggggccagaacaattgaatacagtatctttatttttggtgtaaatggtatcattaataaagctcttctttgagaggagggaccaatttaatgtgtatcttgagggtacacaccaggattatctcttttgtatacaccggaaggaagaatacattgggaaaacaccctcgatttccgtgaaagctaagaaaaagggagaccttcgagagctggagtgttttgccctttttatttcccctcaaacagataacccaagtatgtaagcaaacaggggatctgcagcacaggcacagcggcaatctctcaagcagcactttccgtaaacctgggttaacatctggaccggcagccatttggaatgaagagtcgaatctctgctgcccactgcagtgcagcatggcatacaccaatgactctggggcactccttctgctctggaggctcccaatgacacgtgagctggggacagacagaggtttatcctcttccaattgcctgcaactcatgttgcaagctgaacttgctggatttgccaccgaaaacacaaagcttcctctgtatctcctgatgtatgtttaaaaaaagcagcaaggcccttcacacagggttcatgttcttattgtttgcttgagcgtttcacttgttggggggaagaaaagacctttggtgtacgaagctgggcttaactccccagagcccaactctcccaaggtaactcacggcttcagggtactttaccttcgtgtggggctgggtcttgatggagccgtattcatatttcttctttccgctgccttattaatatctgaaaagaataatcaacccatctgttcaatgctacggaataaaaacaagatcatcagcacatttcaaatgaaagcaacaacaacaaaaactacaatgacaaccagatggtgtaagaaaagccattcagcagagacacactgtcacttgggcaatttttattattgagttaaggtagtacattgtcacggcttggtaagaaatgtcccttcgttttctagttaacacgtaatttgtcttaaactaattacgtcaatgctttaacacgctgccaagacctagacctgacacattccctccaaggggaggaaaaggttgttttctaaactcttagaaagcagctgtaagattctttttgtgaggaagaaagtgggggggaagataaggagagtttaaaaaacaaaagagcaaaggcaaataattctattttatgttactaagaagtaatagctggatttcattgtcttaaaacttccaatatcccatgaagcagggcctcctgttagtgtgtcttgtgttgaattccactggatagaatcttccagaataacatgcaggaaagaaaattattattattatttttaataaacaaagaatatgacctgttaacatctacagataaccaagaataaggactggcgtttggtatagtagggttaggtaataaaacactcctcctaagttgttttcattagagaaggctggcgtatagaactagatatgggagaaaagtagaatcacataagcttaaagaaaagcaaatttgtatagctaaagcctgctttgctaaaaaccaagaatacctgctttacaaaaattgaagtgaataataaataccatgtactaagaaatctatgccccaaaataatacctgacagttttcatatgacttaaagctaaataaatacattacaaatttcatacttcagatgaatgaagaaataaaagtgctttctgctgcagtagagtttgttcccctttttccgtattaaacaattaatagtgtatctaatgacatcaaatggtattaagtactcacataattcgagtgctttaaaataataattatgtattttaaaaatcccaaccagattcctatcacatgaaagaccacagcaataacaagaaacttagaggtctggtagagattttatgctgctattttgccaacttttgagttcctgatcaaatgaaggtaatcttcaattccattttaaatcagaagtctctaatttgtctagaaaaatggcttctgacaaaactgaaaataatataaagctaaatagtgaagtatatcttaaattgattcttaccttttcaattaagcagacacaagatataatccttctattttaaaaaaaacctgaaaatattttctatgtaagacttggccagtaatatctgaccatagctttgctactgcatgcagtactttcacaatttacaactcttaaagtttataatggtctaaattacaaattatataatgacaggccttatagggaatatctagttctattatacgtaattgtgaagaatactagttcaggtttatgacttactgagtctgttcacttactgtgtaccactttctaattatataggttggctatgattcagagagaaatataatatctttgagtattttaagtagttttcaaggtgtctctggaatacactgggtgtgtattaagataaaaaatatacataacataacttcagcaggagttcatatattattaaatggtcttgtgaataaaggaaactcacatctaaacactgactagacctggcaaacattcaggttaagagtacaacacatatagtattactttaattggtaggtttctattaccaataatttgctctctacatatgaaaaggaatattacactgtataattatagccagtttcgtgagcatctacatacagaactggagaaatcacatggtcatgtatactatatctttggaacaaaaccagttctagttagaatgaaggacataaatattttactttgaagctggtggaatcgttttgtaattacttaaaagattaaagaatattcaagattatatctttaaaccattttgattgtaatttgcctcgtagtatctattttcattgggtagtccaaagtatttatatttgacagcatgggatgtttcttctgcaaaaacaagaattctcagataattgtctcattttagggtttagtaaacttttagtgtagtatgtcaagtatctgtttattcatctctatttaagagttccttaaatttccatctgggctgacgtatggagaaaatgagacctggatttttttttttttcctatctaatagaattgctcagattagggtagggctggggagttttcagtgagagttgtaaaaacacaaccaccaacattactgccaatccccatacacccaaaaaatcctaacacatgtgcacatagaacttttgggaaatccatgagttcagaaatacagaagaataaataactttaaggaactaatcacggagagcaaagattcaagaagtcaagaaaaaacttccctcatcctattttttttgtcacagaatttgaaaacctgtcagttggaagcagagggttcatttaaaaaagattttctttgaaaatgcaaatattgagaatgctaaagcaccaactcacggctttacataaaaggaagaaaccagaaaataatccagaaaacatgtaggaaatgacagaactgttttaaaccacaaaagaatggggtgaagaattcccaaagaaagacacagtatctaatctatagttttattttgtattaaataatcagattattttctcctaaatccttatagagagatataatcaacaccaagcaaatagaaatggtgttaatgtaaagaagggaaaaaaaggtagaaagacaatttggagatctttctggacatcagatggggaactctggttggagaaaaattaatcaacaagagggaagtggcaacttgggaatctcttccaaggagaggtctaatgtctcctctgaatagaaaagggaagaaacggtacttctttccccttctgctatactttattctggccaactgcccttaagaccaaaagtcatctctcagtgtcttctccacttcagtttgggtgatacttctatactttgttaattatactagcaatgtgaatgccattcaaaatcatcataatcaccatgaagtgctttatcttggcctgaatatctatagtgtccaagtggtggtctgaaaacagttaaaagcacttctcagttaagaatttttagacaagaaaaagagctttacatacaaggaaaagaactggaaaataatctagaaaacatgctggaaatggcagaaccattataaactacaaaaggatggggtgaagaactcccaaaatatacaatatctaatccacaattttattttagactaatatgccagacaggggtcacaaaatggtccttggataatgctataaataaaaatgcatgtttctttcactcacagtaccaaaaactactttgttctacttattttttaattgtacaatcataaaacaactcttttcaccttaaaaccagattttatagttcataagctacagccacagaaaacaatgaggactaggaataacaagagcggtgtcaaagaaaatttccaggaggccattgctttggactgagctcctgaactaggcccaaagaccaaaccaaattcatgatgaagttccacgctatcaagccaagacaaagatcttttcctgacgttctgcgaaatcaggagataaataatggccaaaaccacaaataggccagttttagccagcatgaaaaggaagtctgcactgctttacccttcacaagaaaagtaactctgaaatgaccaatccgctttttgctccttgtctctgctttcctcagctcccttctctgtttataaagccaaacgcctctgctcagctcattggaacacttgttctattttatagaatgaggtgttgccctattctagagttgcaaataaaagacaattaagatctctaaactaagtgtgctgtaattttgtcttttgacagccacatgaactacaacacttagtgacagtaccaccactagctgttcaaagaacccagaagcctatactgttttaataactgactacaaatgacataaaactctctaaaaggcttagttgaaaaccaactaacaatcaagaattactaaagtggcattacatgctgataaagataatgccagttggaaaaccatactgacaagacagagaatatcacacattaaatcccccaaattgggaggggaaatgacaggacttctcgctaaactatatttatgaagacaactttgatgatatattgcaacatcagggatattgtaatgagttatattgtaacaagtcagggataagagaatgttatgcttgctctttctaaatcaaccctttaagttcactttgaatactatactttccctatatatttgattatctcctttattctccaactaaaataattattacatctttaactgtattagaatattattcctgggaacagaaatgggggaaacaatagtttatacttacagaatgcttattttgttcctgagcctgtgtactaagaacattatgtgtattatttcattcaatccttttacaactcttggaattaaatactgctataatttctactttgcaaatgagaaaatttgaagtttagagaaattaagtgacaggccacacaattatcaggaggcagagctgagactcagacccaggtctttcttacaccaaagtacttaaacattatgctatgctgcctccaacggagtggaaagacatgctttccatttagaatattcttgctaggactccctgatcaaatactgatggaacctggaaaaggtccagtctatgctagacactccattgcttaaatgacccagagacacccaacagggtagaacctacttattcaatgacgacttcagtttctattacctcaaactacagtgtttctggggtttgctattaacattcaccacaactcttccgacaaaaattatcaacatttaatttcctacctttcttattcttttaaggaaagggcatttggctggggatagcaaatctgagctgtggtccttactttgggaaatttactccagtcatttgatttctctgaatctatatttcctttctgacaaaatggatattctgcctgtgttagctatgttgactcaaggagaaaaatcagctgagaaaaaatgattttggatttgcaaaggttgagctaatctaaactacaaaaaaagagtctgagctgcttaaaattttaaaatacagatttaaaactggcaaattttcaactaaactgtacaagtggagaacaagtgatgaatttgaaaaggatagcttataattaatacattgaatgcttcattgattcataatgtcaaatgcctactatgtgtcacacatgtcccaggccttacacatgtggaaatgacacagctaaagtccttgccttaaagaagttcatttttaaaaaagaaagggtctcagctctgttgtccaggctggagtgcagtggctcgatcataactcactgcagtctcaaactcctgaactcaagcggtcttcctgcctcagcctcctgagtagctgggacaagacgcatgcaccaccacacgcagctaatttttttttttttgagatactgtctccctatgttgcccaggctggtcttgaacttctgggctcaagtgatcctcccacctcagccccgcaaagtgttgggattataggcatgagtcaccatgcctggcctggagttcactgtttatttaataaaggagaggcacaagtacacagataattacaatacaatctaaagtgggattatggcagagataatggagtcctaattttgtgtatgtgtgtggcaggtgaaaggaacagagcagagaggagactaggaagaatgtgtgtatggagggggtgggggtgaatgggatgggaggaggcagggaaggcttaaaaataacatttaaactgggtcctgaggaatgagtgggagtttaccagaaagagaaaagtcatcccagaacatacaaaggtaaaggaatggtgtgaaggacataataaattagaaaaactacaggaagtttggtgttgggaacacggggataggaggaataaaagagagaggaataacatgaagcaagagttggactagatccagattgcaaaacactttgctatggacaaggaagaatctagtggctagagggtctattgggggctataaactgaactaccacagagtctcaatgaagccaaattaacgaaactttatgtatattatccccaaatgcggtgagggagtatttaaatgtaagacattcaaaatattgcccattttagtaacattcttcaaagaccattggtttgacactgaaggagaaaaaaattgaaaaagtcatgattttactttcaataaagggctcccatgtagctaggaatacaggtgcatgcaccaccaccctggctaattttttttgtagagacaggatctcaccatgttgcccaggttggtctcaaacttctatcaaaagggatcttcccacttcagcctccccaaacgctgggattacaggtgtgagccactgtacccagccttaagatactttacagagctaaaggtataagacaagacactctgttttctaatgcaacttaagctgccctgatccttgcctaaagttgtctggtctttacataggatgtctggaaaagttctgattcttatgaggtgaactatttccttaacataaaattggtccagatgacctattatctctttttttaagtgaaaggataaagaatgaagatgaccattcccataaatattcatatctggtggtaacaaaaccaccatttaaaaagcagcatgcatgctggtattatatatttagctgtcaatatacttcatatttctctaatgtactgctgcttgagacagtggctttaccctgatcctgtcattaatgactctcattaatgagagtaacataaaggataattctgttagtcattgctcttttaactttttgacagtttaactctgcttaagcagaatggtctaaacaaatatatgtgctattcacaggacaactatttttgcacaaaaaagctgatattgagctttaaaagcagctgtcttaaagatatgcagtaatcattaataaaccacaaggtacagagaggaaatacagcgtagtagaaagagtagtcagttctgaggaacactattacttcaaaatattcatgagaggatagcaggagaaaggcatcatgataacttcctctctcagatattgacattgcacatatttagcacataaatgcctctgagaagttttggagtaaggacaccactatatctcaacatttcccaattttgcttgaccctgaaatcaattatctccaatgatgtcttgaatatgttctactaattatgtgatctggggcaagaaatctaacctctttgagtcatcatttccctataaataaaaaagatcaaactagtttatcagtctcataagatgacgggcaggagcaatgatttagtatttaccatatgcactactggctgtatgttattatcattactacactaagagtaacagtgacttcaggaatagacgtttcattcttcacgtggggagtcaaaaacaagagaacaacctaaactgaagggaagaaaaagtttaatatatttcttgtgaagattttccattcttaaaagcacaactaaattttattaatcctcacagtagtaaaacattacacaaaggcactgccatctgcaggtcataaacatggactgcttgcaatgattatttaaaatgaagtttcaaaccaataaatcttttctcatcagactacgaaagtctttccaaaaattgtttattctggttggacgcggtggctcatgcctgtaatcccagcactttcggaggcagaggcgggcagatcacctgaggttgggagttcgagactagcctgaccaacatggagaaaccccgtctccactaaaaatatacaaaattagccgggcgtggtggcgcacgcctgtaatcccagctacttaggagactgaggcaggagaattgcttgaacccgggggccaagatcgcaccactgcactccagcctgggcaacaagagtgaagctctgtctcagaaaaaacaaaaacaaaaccaaaacaaacaagttgttttttcttagctctcaagcactggtagatgagtttccatttgctgaagttctgaaacggacgccgggcttaaatcaaattctcagaaatgtgaagaaaatgaccttagccttacgtaaattctacattgtgatcataccaaggtaaccccaaagaaacatgtttttaacagggggagagatacatacacacacacacatatatatacatatacatatatatatatttttttacacagcctttgaggggaggggaagaaaacttgaataagcctgaactgacttatgggactttcctgtcaatgatttaaattaaatctgctcttacattcacataaacagatcttatgaacacactattaacttacaagtaagttaatctgtcaatgcctcctttaaacttgtggtgttcacaggtatgcaacattgagcaaactgaatctagaaaaactccttccaatgagccttgcaatatggattcgctgggacattctacaaggaaaatcagtgtttctaagttttaggttaagagaagtgtcagaggtttcaaaggcaatctgaagagtgacagatgagctcaaagaaaggcaaagaaatcacaataaaggaagaaatggatgttaacaaatagccaagtgatttctaatatccacaatgcaaagcatgggctttactggttgcaaaaagtagacacaaagttagttttcacacccagactgactcatagagaaaacattaaattaagagttgtcaaaactcacaaaagcttccccagcatttgtagaaacatctttttatgagccaacagggggctacgacatcacaacgctgtaagaaaattcaggcacaccgggtgcacctgagtgaacacagttcttgcagttccctgggactaacacttttaagtcaacaaagagaacagtttacaagaaagctgttacattatccctgaagagcccagggcattcatagaatctgctttgcctcaggaaaaattctgtgcacagagtgcaagccagaagaaccacaattaatcagctactcctcgggcagcgtttcccaaagtgtggaacgcagaataatttcaggaggaacaaggacgcactgtttatttcaacagacagatatttattttttttataagcattagaaaaataactggctttccagtacccggtttgtgattgaagttgccgccttaaatatatttaaggagaaaaaaagagtcagtttgaattttttaaaaaatgtaacatttggtaaatagcagtacagatggtccacggacataaaggtgcaacgcgagactgaaacgtgtgcaacgccgtcctaagagaagcccctcgcccgctggcggggagcggacagtgccccgcgccgggagcttggaaagccggccggatcggacgctggcgctgagctacgtggtaaacccgggaacagttcctctccccgttctctgggcccgaggtccgcgcctacaaaacgcgtggggtgtcacaccacaaggagacaccccgagaatgcggtcaggggccgcgagacggtggcgggggacagcgctcagtacaccgctcggcgctgcacgcctggagaacgcccggtgccacgggacgccttgggcccggttcgaatcccgactgcgccactgactcgctgaggacccgcgggcgagcgactccaccgtttcgacagggggtgcgggatgtgcggctcaaccagagaagccttgaggactcctagtgaccgaccgttcgtgcacagacaggcggctgcgatgcgacgccgccgacctgcgtccaccacagagaaccgtaggccgcctcggccggccgggcctgggcctgacgggagccggaggcggccgcgccccgcaccgggcatgcgcagcaccgcgcgcacccggagaggagccgagaccgtggccgcgcgtcgagtgggccttcccgcctcagcctccccgtccggccaggccccccacaacggcctgcccgtcagccccacgcctcggctgacggccagcgcttcccggcactcaccgctaccagcgcggcgggctcccggccgctccttcgcctcaggcccgccgctgccgcctccgcgtcggcccacctgcccgccgtaggacaaaggcgccaccaaccgaccggcgcgggcacgaggcaatggcggccgggcggagagtggagatgggggcagagggcgcgcacgtagcggcaggcgcggcactgtcgcaagaccgcgcgtgtttacggcagggctgagttggggcgtcgatctccttggcaatgagggcccgggaagtggctctcgggcgggagttgagaacgcagggagttgcctagcaacagcgtcctaggctgaggatgggccccacggtggtcgcctcagcccccgccccagagtactttttttctgttttcagagcacattccctcctccctaactgtgggaacagaacattcaaatccccaaataccttgatttagtcttgcataaaactgaaagcaaaaaccccaaatccctatacacgtgtgtattggagaatatatatagtcctgtaacctccggaccacaaggaacaaagagagcagaaaggtggagaaaatgttgtatttaaatttacatttaaataggctctgtactctattagtttcactgacaagcggcaaaaggtttctggagatatagtcacaggttcttcttgagttatttattcttggaatattcgttcaacgtcaaaaatttcccggaatgtaactgttgaccgtgaagcctgtaaaatgttgtactgttcatttcatgtatagaatacatttgtcacagggaatgggatttgctcacacaatagtaaatgcactctattaatcacagccatagctatattaatcaggtactcttttattagtgttggaaacgcctcagactccatggggtctagttcttctccttgcgaatattgcctactaagaaaaaatggtgcctgcggaatttaaacactacaagaagccagatttctttgacatctacccctatgctcactccactcatttattcactgaatgtttattacatacctactatgtagccctatacttattatatgcctgcttgttaggcgctgttatgagcaaatgcagacccttttctgctatctttgagattacagtctggtgaaagcattagacgaataatcacacttgagtgtgtaattgcaaactgagataaacgctgtgatggaaagaaatagggattctcaatggttgtaactagaactttagtttactcacaggcaaagtgggttattccaattcccactttataagactgtatgaaattagaaatgaagacataaagtctgtcaaataatggatacccaacaaatgttcattcttattcctttccctccaatatagatcctaatactatgaaaatttaagaagaatcatattaattagatgattaagataaccaagcttagggaaaaatgttggtttagaggtgagtggcagtacctcaagtgggtagtggactttagccaaaagatgtattcagtgacttgtgtattaagtgtttaatgagtgttttttatgcacttgattttgtggagagtagagagtaaggtagacaaaatccttgtgcttagggagctcatggcctattagggaatatgagcaataaacaaacgataatatatagtgtttgatgagtatttttgatagaggagcaagttaattttatgaagaaagattcttgtagggaggcaggtgctcaggacttggtgacttcttatttagatgtttgctttacataataggtaacatctattgtgtgcctaccatgtgctgaatcctttacacatatcatctcatttaatcctcacaaccctattgagaggtgacagcgtgctggcagccctcacagcccttgctcactctcggtgcctcctcggcctcggcgcccattctggccgcgcttgaagagcccttcagcccgccgctgcaccatggaagtccttctctgggctggccgaggccggagccggctccctccgctttcggggaggtgtggagggagaggcacgggcgggaaccggggctgcgcgcggcgcttgcgggccagctagagttccaggtgggcgtgggcctggcgggccccacactcggagcggccggcccgccctgctggccccaggcgtgagagacttagcacccaggccagcagctgtggagggtgcgccggatcccccagcagtgctggcccaccggcgctgcactcgatttctcaccgggccttagctgcctccccgtggggcagggctcgggacctgcagccagccatgcccgagtctctccgccccaccaaccctcctccctcgggctcctgcgcggcctgagccttcctgacgagcgcagccccctgctccaaggtgcctggtcccatcgaccgcccaagggctgaggagtgccggtgcacggtgcgggactggcgggcagctccacctgcggcccagtggaagatccactgagtgaggccagctgggctcctgagtctagtggggacttggagaaccttcgtgtctagctaagggattgtgggtgcaccaatcagcactctgtgtctagctcaaggtttgtgaacacaccaatcagcaccctgtgtctagctcagggtttgtggatgcaccaatccacactctgtatctagtggggacttggagaatctttatgtctagctaagggattgtgaatgcaccaattggcactctgtatctagctcaaggtttgtaaatgcaccaatcagcactctgtctagctcagggtttgtaaatacaccaatggacactctgtatccagctaatctagtggggacgtggagaacttttgtgtccagctcagggattgtaaacgccccaatcagcaccctgtcaaaacggaccaatcagctgtctgtaaaacagaccaatcggctctctgtaaaatggaccaatcagcaggatgtgggtggggccagataagcgaataaaagcaggctgcctgaaccagcagtggcatcccgctcgggttgccttccacactgtgggagttgtgttgttctgctctttgctatcaatcttgctactgctttttgggtccacactgcttttatgagctgcaacactcactgggaaggtctgcaggttcactcctgaagtcattgaaaccacgaacccactgggagaaacaaataactccagacgtgccaccttaagagctgtaacactcacctggaaggcctgtagcttcactcctgagccagcgagcccacgaaccccccagaaggaaaaaactccgaacacatgcgaacatcagaaggaacaaactccggacacgacgtctttaagaactgtaacactcaccatgagggtctgcggcttcattcttgaagtcagtgagaccaagaacccaccaattctggacacactgtaatatgtgtactatattcctattttacaaatgagacaattgaggccagttaatttgcttgtcccacagagattatgtggcatggccagactcactgaacctgtgcggcctgatgcccaaaatgctattgtaaccacgagtgatactgtcttctgggataagaggttcccttccaaatcagggggtacctgattggtgtaaaagcctgtaacccttcagaggtgagcaccaaagtttgaccaggagataaattgaaaatctgctacagtggaggccatctgatttctgtcagatagatctttaagctcactggctgttaaaatttggtgtacagtgggttaccccttactgtaagggaagaaaggtatagtttaaagtgtggccagtactaaagaacgatgtgtgtttcctagaacatatgagtaggccttgtggtttacaggacagccaagacagggcaatgagcaattccactcaaacagcaaactggagggggcagcatttggtgctcagcaaatacctgttgaatgaagaaaaaaaaagaagaaagagtaaattcaataccatagtcaatagtggaggaatttttttgagatatcaatttggttttattttaatctggtatttttcttagtatttcagactgctttataggatgaagccagatacgttttgggtaatgaagtggtgattaaaaagtgtctaagcaatgggctcaggaatatcccaggagagagaaccagagggtctatgataaagaaaacatgtagttttttttttttttttttttaaggacaagattactgcagagaatcagaaagtaggatcagaaggcaatcttgagtaaaacccttccattttgacaaatgcagggcataatatagcctcaaaattttgatttttaaaaattaatttttttagagacagtctcactctgtcaaggcgatcaagccttgaccttctgggcttaagtgatcctcccacctctgcctcctgagtagctgggactacaggcatgtgctaccatgccgggcttttttgggtaatttttgtagagacagggtttcaccatgttgcccaggctggtctcaaactcctgggctcaagtcatcctccctctcggcctcccaaagtgttgggattacaggtgtgagccactgcaccctgctgaatctcacttttgtattggtgatgagcggctggcctaaagacctattctattttttttttttttttttgagaccgagtctcgctctatggcccaggctggagtgcagtggcacaatctgtgctcactgcaacctccacgtttcaagcaattctcctgcctcagcctcccgagtagctgggagtacaggcgcccgccccacgccctgctaatttttgtagttttagtagagacagggtttcaccatattggccaggctggtctggaactcctgaccatgtgatccacccgccttggcctcccagagcgctgggattacaggcgtaagccaccgcgcccggcccatgaagacctattctaaacgccaacagcactcagatgcagcctgagtttgcaaaaacactttcaggaatactttgcatatcatctgacacaacccaggagaggagaaacctagtacttaagagcggcagctttggtgatagaagtcagaatagaggttaactctgggggcatagactggggaggagcttgaaggaactttcaggaagatggaaatgttctatatcttgatcccatagtggttacatggaatatgtacacaggtaaacgtctatagagtcatgggtttaaaattgtgcattttactatatgtaaagtatacatcaataaaaatttaattaaaagaacaaaatgaagattttgaaatcaaaatgatttgggttcaaatcatggctctgtcccttaatttagctatgtgagtttgggtcttctttcatacatttgatatgtattgagtacctcctaggtttaccatgctagacacaaaggacacagcagtgaacaagaaagagatggtccgtgctttcacagagcttcaaccaagccacaggtacctgtcttgacaatagggataataagaccttcctcatgaggtcattgtaaggattaactgaaatcatgcatgtaaagttcctggaatatagttgatgctcaaaaacaaacaaataaacccaaacattttatacagtgtgaggaacctgatacttaggttaagtgacttatctaaagccatacatttactaagaagtcaagtcgaaaccagaacttagaacccaagtcttaattcaaagtcctataatttttcaattacaaccacattttcctgttatatctttcatttgtgtgaaaggaaagcactttacatcttgtgtactatagctaatgtttacaaagatccctgaatgacactgagatagagttgtcagatttaataaatacgagtaaaataaactaaacattttgggcctgctatggtgcctcattcatttaattctagcactttgggaggccaaggcaggagaactggttaaggccaggagtttgaggccagcctgagcaagatagagggacccctggcctacaaaacatgaaaaaactagctgggtatggtggtatgcacctgtagtcccagctactcaggaggctgagatgggaggattgcttgagcctgggaggttggggctgcagtgagccatgatcgcgcaactgcactgcagcctgagtgacagagtgagaacctgtctcaaaagaaagaaataaacaaaaattacgctttttaaaaagtatgccccatgcaatattttggacatatttatactaaaaaattagtcattgtttttctaaaattaaaatgtaactggatgtcctatattttatctggcaactctacactgaaagaatcattgaattttaaatagatggttcttcattagaagtgatcttagtttctaaaagattcacataaagaaaaagactgaaaaacatttagaggttgaggtgcttgtttcttttcttttttttgttttttagtcagggtctccatctgtcacccaggctggaatgcaatgacatgatcagggctcactgcagcctcaacctcctgggcgcaggcgatcctcccatctcagcctctcaagtagctgggaccacaggcacacaccactagtcctggctaatttttgcattttttgtagagacgcagtttcatcatgttgcctaggctggtctcacactcctgggctcaagtaagcctgcctccttggcctcccaacatgttgggattataggtgtgagccactgcacctggcctggtatctcttaatttaattttttaattattatttttctggttacatatacagggacagagattctgtgatccaacttcatcttgccatctttacccagaactttcacattacctcatttactctacacagcaaccctgtgtgatgaatgctaaatgatttaaactttaaacgttccttaacatttcaaacatacataaaatacatacctttctactcaccactgtgattaaacaaatgtaaatgcttttgctaacttgctttagaaatgaagtgatataaaaacagctggctgggcgcggtggctcacacctgtaatcccagcagtttgggaggtcaaagcaggtagatcacctgaggtcaggagttcgagaccagcctggccaaaatgatgaaaccctgtctctactaaaaatacaaaaattagctgggcatggtggcacctgcctgtaatcccagctactcgggaggctgaggcaggataattgcttgaacctgggaggtggaggttgcagtgagccaagattgtgccattgtgctccagcctgggcaacaatagcgaaactctgtctcaaacaaacaaacaacaacaacaaaaacagctaagatccttctatcaccctcatctctctccaggtaatcactcccctgaaatacattcccatgtatatttcgtactttaattttattttatttttaacagacagagtctcactctgttgctcaggtaggagttcagtggtgctattgctcactgcagcctcaaactcccgggctcaagcaatcctcctgctgcagctgcccaagtagctaggactacaggtaccaccaccatgcctggctaattttaaaaactgtttttttgtagagacagggtcttgctatgttgcccaggctggcctcaaactcctggtcacaagggatcctctcaccttgacttcccaaagcactggaattacaggcatgagcccagtcatagagtgcccagcctatattttttacttttatcataaaagatatatccataaactgtatagcgttgtttaatagtgtttagatacagtttatgtatccttttatgactttttaaaactgtactaggtttttaagatttaagtgtgttgaaacatgtaactagtttactggttcttaaagtgtagtccctggactagcagcatcagcaacatctgagaatttgttagaaatgcaaatttccactgaataactcagaaaccctaggggtaggacccagtcatctgtcctttaccaagtccttctgatgatttcgatataccctgaagtttgagaactactgatctaatttatttgttttctagtattatactgtatgaatcagccacagtttatgtatctgtactagataaacctaaggaagttaggtttttgttttgttttgatttttgtgattgttgttgttgtttttgagacggagtttcgctctgttgcccaggctggagtacagtgacgcgatctcagctgcaatctctgtctcctgggtttaagtgattctcccgcctcagcctcttgagtagctgggattaaaggcatctgccaccacgccaagctaatttttctatttttagtggaggtggggtttcaccatgttagccaggctggtctcgaactcctgacctcaagtgatccgcccaccttggcctcccaaagtgctaggattacaggtgtgagccaccgcgcccggccctgcttctttttacaaatggtgctgcattgaacctgctagtgtgtatctccttgggtacccatttcagagctttccaggatactcatttaggagtggaattgctatctttgtagtagatcacattttaaactttacaagatttagcaagattactcgccaaagaagtattatttaaagaagtatattcctgccagcagtgtataagtaccatttgtaaatttccttgccaacttttgatattttcagactttattcatttatttatttttgactacgatgatggctgtgaatgatgtatttgtggatttcattttaattttcttgaattcagcgatattcagcaccttatcctacagctctccaggtttctttctttgtgaattgcctgttcacatttctggcccatttttctattaggtttacctatggttttaaaaaattagttcataggagttctttacgtattctggatactgatcttgtgtccgggttgggtcttctctctgtggtttgtcattttactttgtcaatggtgtcttgtcattcaaaagttttaaattttaattgaaatgtttcaacattcccctttatggttcgtatgtagtgtcttgttgaagaacgtctttcccagtgtcatatagatagtctccttggtaaatactaccatgatgtcagtttggtagatgagtcaactgaggcactgagagcttaaatgacatgctcagggtcacagaccactggagatgagagacttgagctcttggtccctgggttgcactgcactccacggttccagaactttttgccatcctattctgctgcttgtttcatgagaactcttgtcagcctttttccgtaggtagagagggtgtgcagagctcagaaaggatgcaggtttggtgcagtttttatttactccataatgaagcacccataatgaagcacctggctctagactttaggatttttaaaaagatttaaattatttaaaacaacttcagatttatagaaaagtttcaaaaaatagtataaagaattatcggcccagcatactggcttacgcctgtaatttcagcactttgggaggcggaggtgggtggatcacttgaaaccaggagtttgagatcagactggacaacaaagtgagaccccatctctacaaaacaaacaaaaaaattacccaggtgttgcttccgcttggctgttttcctgcacaggagggccgtaggcacccatggcgcccagccggaatggcatgatcttgaagccccactttcacaaggactggcagcggcgcgtggccacgtggttcaaccagccgacgcggaagatccgcagactcagggccttgcaagccaaggcgcaccgcatcggcccgcgtcacgcatcggggcccatccggcccatcgtgcgctgcacaccaccctccctccccgcccccgtggttccgtaccacacggaggcgcccgtcggccgcggcttcagcctggaggagctcagggtggccggcattcacaagaaggtggcccagatcgttggcattgctgtggatccgaggaggcggaacaagtccattgctgtccctgcaggccaacgtgcagcggctgaaggagtacctctccaaactcatcttcttcctcaggaagccctcggacccccaagaagggagacagttctgctgaagaactgaaactggccactcagctgacaggaccggtcatgcccacccggaatgtctataagaaggagaaagctcgaatcgtcactgaggaggagaagaatgtcaaagcctttgctagtctctgcatggcccgtgccaacgcccggcttttcggcatacgggcaaaaagagccaaggaagctgcagaacagaatgttgaaaagaaaaaataaagcccttttggggacttgagacaagagaaaaaaaaaattacccaagtttagtggtgcgtaactgtagtcccagctgctcggggaggctgaagcaggagaattgcttgagcccaggaaattgaggctggactgagccatgattgcaccactgtactccagccagggtgacagagtgagaccctgtcgagagagaaaaagagagggagagggagaggggaagagagagagagagagaaagtaagaaagagagaaagagagagagaaaaagaaagacagaatttctgggccgggcgcagtggctcacgcctgtaatctcagcactttgggagaccgaggtgggcagattacaaggtcaggagtctgagaccagcctggccaacatagtgaaaccccatctctactcaaaaaaaaaaaatacaaaaactagctgggcgtggtgctgtgcgcatgtaatcccagctacttctgaggctgaggcaggagaattgctagaagctgggaggtggaggttgcactgagctgagattttgccattgcactccagcctgggcaacagagtgagactccgtctaaaactaaagtaaaataaatttaaaaaaaaagaatttttgaatgtccttcacacagattccccaaatgaacatttcactgtttgctctataactcctcctctacccatctctttctgttcccctctctctgactcttgtctaatctacagacttcatatgcatttcacaaatggtcccagtaatgttcttcagagcaaaagaaacactgttttttttcctagtccagaatccaatctaggatacatgttgccttcagttttcaagtctcttgagtctcctttaatctacaacagttcttcagtcttttttgtctttcatgaccttgacatttttgaagagtacaggccatttattttatagaatgttcctctttggggcttgtgtgatgtttattcattgttagattcaggttatacatctttggcaggaatgtgcagaagtgacgttgtgtccttctcagccagtgtttgttctaaacccttttgactagaaccccctgaagcattatgcgcatagatgcattttttttttttcaggcaaagggattaaaatctcttatatacaattctcagagggctcacacgacctaataagagccaacatatggccgggtgcggtggctcacacctgtaatcctagcactttgggaggccgaggcgggtggatcatttgaggtcaggagttcaaggccagcctggccaacgtggtgaa[140 bp omitted]cactccggcctgggtaacaagagtgaaaccctgtcaaaaagaaaagaaaaaagccaagacattccacatttctccttgcaggtcttggtggaagtccttggctaacagggctgtctgaaagaggctaggagacaggcaccgagagtgggtgagaagaggtttctgcatcctttacagactccacggccttctgggacctgcctatgctgccccagggaatatatctagtgtgccatgcaaacagatatcccactctccagcttccttggcccaagtatattgagggaatttaccatttatgaagtcttggtgggtcagaacacaagctgtggaatctgcatcgtccgtgttcacttctttctccaccacttcctagctgggcaaactttggctttaacctccctgcacctcacttccttcatctgtcaaagccgtgtaagaatagtcaggaggtcaggatgaagtaagttaagttaaatgaggtagcacgtatcactcttagaatcatgcctggctcatcgtgtgggctcattagctcatagatctcaccttctctaggttcacttgatgacatcacactttgtgtcttcttatagatttgcttgttctatttgttagactattcctagaaagcagaggcccttgggttttcatgggctactctgttgacagagggaataaacttcactgatcattgagtgatcattgaattctggtccactaggacattggagtgggggtagaggggactttgttgggaccatatcaagtttctggtgagccccaacagaactaatagcttctcaaagcgagattctgtaaaacacagtgaatcagaatggaactgcacacacttgacaagctctgttgtatgttgatagaggtggctcagagagttgttgaaagactaccctaaagtctctcccggccagtagagagcttctttggcagggttacctggcttgaagcccagcctcagtgacacctaccatgtcagcatagctctgtacaactgtgctagtcagaataatgactccctgaagaggtccacgccctgatctccggaacccgtgaatatgtcaccttaaacggcaacaagaactttgcagatgtcattgatcttgagatggggagacagtcctagattacttaggaacactcaatgtaatcacgagagttcttataagagggaaataggaggctcagaatcagagaagatgtgatgatagaagcacaagagggcgggaaggaaggaggcatgggccagaggagagaaagatgctacactgctggctttgaagacagaagatggggccataagccaaggaaagcaggtggcttctagaagctggaaaaggcaagaaaacagattctcccccagaccccccagtccttctgacccatttttgactttggactgtcttctctccagaagactaaataaatgcatgttttctttttctaattttaccatggcttacttttttcccttttaataattaaacctttaatccaattaaaatcagtttttgatgcatgacgtcatgagtaggtgtaattagattctttctcccttttaataattaaatctttaatccaaataaaatcagttttttttggtgatttttttggttttgttttgttttttcttgagacagtctcactctgttgcccaggctggagt[134 bp omitted]aagatggagtttcaccatgcccaggctggtcttgaactcctgagctcaagcaatctgcctggcttggcctcccaaagtgttaggattacaggtgtgaaccactgaacccagaatcagttttgatgcatgaagccataggtaagtgtaattagattctctctctcctcaaataatactgcttaaccatttttgtgtttcttatttaccgcatacattattttctacaggaggatcaagttcagggatatcaattgtttctatagctgtctctttttgaggcattctgtactgtttcaattatgttactctagatggaaatatttagatattctgtttccagaagccatgtgaagtatgcttgtgaaaatatttaaagagaattatctttgatgtaggtaagcgaatcttgtttgtgctactcaaatgaccagattaatctgattaatgccctccttcacttgaaattcaaaggatccattttccaatttgcctacaagtgttggggtatataaatagaatgtaactctaataatcatacagaaaggtaaagtaaaatgtcagagtcaggcagctcagctgagttggtggctcactgtttcctgaagatttttattcattgagtccagggtagaacttgagaatatttatttatttttttttaaaaaaaagctctctcaggtttgcaaaccactgggctggtttacaaattaaaactgcagagataaactacctaaaagccattttccacatgtcaccaactttcagggtccctcacaaataacccaaactgagaatgttaaatctcccttatgagggttagaagtagataactggccaagtcagtagagacagaatttgaagaataagttttccaaattcaaaacttagtggtgttaagtaactattttatccttattcatagtttctggaaatcagggtttccagaggggcttggttaggcaatttttcttcacatagtcttagggcctatccacgtggtctctgcacaggctgtggagagagggcttcctcacttcatggcgacctcagagcagttgtgctgctcacatgaagctcagggctctgagggagtggctaagagaaccaggcaggagctgtattgccttctatgacagtttcaagagtcacataagcctggccagattcaagggaagggagcgtagaaccccatctctcaatgggaagaatatcaaagtcccactctgagatatggttgtggccatcactgggaaatgcggtctgccacagtggagtcatctgttgcccccacatccagtgcaccagagcctttctctcaaatctttctcgaatctatccacttctctatgtacccctgcccaccactagtccaagccatcatcatccctagctcggacccctttgactgcctccaaaccagggcccccaattccacttttctttcccttcaattctttctcttctgcagctagagtgatatttttataaaacaaatttaattgcactccccattgttctcagaataataataaagctgccttcaaggccctgcgagatctgtatactttctgccttccagacttatcttatcccactgtgccccttgctttccaatctgcaaccccattggtattctttcaggtcctacatccaccatgttctttccacctcaaggcctttgtacctcccatttcctctgcttaaaatacttccccagcccctttcctacctctccccgctccctcctccctttcacctctttaactcctactcctcctgaagaatgagtctttgcagatatagttaatatggggtcatactgcatggggggggggcgctaattcaatgctggtgccttaataagaagagagaaatgtaattgaaatcttactcccctgcactcagagtagagagggagtatggcatggtagctaggagcacagactatggattcagacttcttggctctaaatcctggctctaccatttactggctgtgtgaccttggggacgtacctaacctctccgtgcctcagttttttcctttgtagaacaaggatggtaacagtacctgtctcaaaggattgctgtgaatgttggtgagttaacataggtcaaacactgagaaaaacgcctgccacttaatgctaaataagcttggctggtagtagtttgtcatcttgttgcatgctcttataggatggtgcatttctcttttctaccatttgctcaatcagaggccagataatgggacgtgaggagatgtttcctattgtctcctaatctatgactttagacccacagctgaggataaacgggtgctaaatatattatgaaccttaacctggggttcatgaacttggatggaaaaaatttactcctttattttcattgacctctaacttaaattaagcatttcttttgatcatgaatgtaggcaataaactacagtagtgttagcagggcctgctacattgtcaccaatagaaggcacagatatttctatttgatatcacactagagttgctgctgcagatgtcttgaattattgtttgcacacatcattactctgaaattatggaggttttaggcttgccactagagcttgttatttaatccagtattaaagaggcatatatatactatatcacatacttgtcttaatattttgataactatatttcaatataactggtcttctttataactctctcatattttacatttacaaagatttttctgagaagagtctgtaggattctccagatggccagagaaatctacaacacaaagaaaacttaagaatcctgttttaaagaaagtagccaacaacttgggtgaaaagctcttttaagggcatattaagaggtgagtgctttctttgagtcagccatagtgctgaggactttatatatatcttcatttaatcctcccaacacccttagaagtaggtattattatttattcccattttatagacgagaaaattgaggctcagaagagtagggatattacccaaggtcacagagtagtatgttaatggcaaagtcgtataaatcatttgagttggttaggcgcagtggctcacggctgtaatcccaacactttgggagtctgggtggatcacgaggtcagaagttcgagatcatcctgaccaacatggtgaaaccccttctctactaaaaatacaaaaattagccaggcattgtggtgcgcgcctgtaattccagctgctcaggaggctgaggcgggagaattgcttgaaccctggaggcggaggttgcagtcagctgagatcatgccactacactccagcctgggcaacagagcgagattccatctcaaaaaaaaaatcctttgagtctttgccactaccttgcaaagtaagtacctcatactttcattttacagatgaggaaactgagactcaaaaagatagagtcattttatttctcactgttaagtgatatagtcaggatttaaacccatttctgtgagactactaagcccacatgttccactgtacctggcagggttaattacaggtaccatggaaatatagcctgggagagctggtggtttatcagatacctttctatggcatccatcaggatcaagtagtttggaaagaaattattacttttactgtttttgctgtggggtgacagaactgtgcggggaatgtctttatggatgtgaaattcacgtcagcatttggaaaactccattagccactattgtctagactagggagttaaaagtaggaagcaagagataaaagaatacatgggtaggaaattctgtgttggctcatgctgaaacggaaagaatcattattttgaaaccattaatgatgaacttggtaaggatcaaagtagtctcgtgatctgtaaatctaatgaaatgaaaatgaggtaatggtatgttttataactacggaggatctgagaagctggaaattatctcagcgtgaatactgtaagagaagagggaacaatggaagccatctagaaaagaatctttattcagctttatttatagcaggtattcgtcttgtctttcaatacagggatcacaaaggagtttgtttcaccttgctgggtgtatgaaaatacaacagttgtcacagtccctgctgcttccttccatggaacttaacacgtacaaaggagggaaaggtggagacctatgatgagggggatgaatagctcaggctgggaggggagactggaggtaagagagactggggagaagaaaagacctaagagagattctttccaccatttcccaaccccctttctctaattttttacttaaaaaaaaaattttttttttacagagatgggatctcactatgctgtccttactggtctcaaactcctaggctcaagtgatccttcctccttggcttcccaaagtgctgggattacaggtgtgagccactgcacctggccccaaccccttttctctagacctgagctatctaacatagtagctaccagctatatgtggctttttacatttgataaaagtcaatacaataaaacccccactttcttggtggtactagccacattccagatgttcaacaagcacatgtagctagtggtagctaccatattgaatggcataaatatacaatgtttacatcatcacagaaagttctattggacagcacaaatcaacactccaatccacctagatgtttaggagtatttaaagcctaggacaagggaaatcccatgactgtaacatccctggcccaaaggatgacagagaatagagtctttgaaatggggcataagggtcccagtttcctgggtgaccataggctagctacttctgttctctagaactcagttttctaatattaaagagtaataccattttttattagacattatgtgagaaaatcacatagttaacttagtccttataataaccatgtgagctcttaggctcatttcacagagaagaaactagaagttaagaatatgctcaaggacacacagtcagtaacagaatcagattttgggccaggcctatgacttcagaaattacacttttactcatcgatcgatgctgcctcctgctgctagttcctcatttgtaaatcaaagtgcctttgctgtattctcccagaaacagaaactgagacaaagatttgagtgcaagtagcaagtagtttctttgagaggtgactccggggagcactgatggggtaatggggaactgagacagagaggagaaggaagccattacagggtgggtgaatgagcaggttacacagtgggcaactgtggcttcaccttgactggacagacagtgtagaacacataccttttagttatcccagctgcggggaaaggcagctgcggcattgatccaccaactcctcatctgtcattggtagaaggctgcattatctccagcccttctggcctgccctctgaagggctaaacatgctcttgtggccaaaaaaggctctggggcagaaggtcacaggtgcttgagataggggacaggaagagtgggaacagtgaatatggaaggcctgagggtggagtaccaacaaggtgctacatggggattggattaagtcctctttctgctctaaccaattagtggctagcggtgctagtactaggtattattaggtatttttacatcataaaacctgaaagcataatgactacaatctaccagagcagggatccccaacaccccggctgtggaccggtaccagtccgtggcctgttaggagccgggcgcccagcaggaggtgagcggctggctagcgagcattacaggctgagctctgcctcctgtcagatcagcgatggcattagattttcatgagactgcgaactctatagtgaaccgcgcaggtgagggatctaggttgcgtgctttttatgagaatctaatgtctgatgatctgaggtggaaccgttttatccaaaaccaggaaccatccttcccaacccctctatccgtggaaatattgtcttccacaaaactggcccctggtgccaaaaaggttggggactgctgtaccagagcctatctgtagaggagagactggagatacaattagacatctgagctgattttcaacatggatgacagagtaaagggttaatattcagggctgggattttgtctagttcacgtgacctagtaagtgctcaatgcatattagttgagtgactacatgattgaataaagttaatatgaaacagacaatttaatagaaaatggacaaaggatatatacagttagttcacagaggaggatatccaaatggttgataaacatttgataggatcctcaacttccctaataattgaggaaatgtaaataaatgcagcaaagagatctctctcttcaccatcaaatggtcaaatattaaaatgaatgataacatttagtactggggagaaggcagagtaaaggtcccttcaaacatatgaatttcccaaggtttttggaaagtatctttaaaatatctgttagcatttacaatataaatacccacaaattccttctagaaatctattgtatagaaataaaaacacacgtgcctaaccatacgtgtaaaaacattgttgcagcctgctttgcagtagagagaacctggatgcaacctgaatgtacatcaacaggaaaatggttaaattgattgtgacaagtccacaccatggaatcttacacaattattttaaagaaagaatgtgtacgatctgtatctactaacctggaattatttccatgatatattattaagtgacaaaaatgactgcaaaaaaagatagagattccttttcttattaaatgaacaaatatattcttaaatgtgtagacagatatttatcaggctattatggggagagaggtgtaaagatagataaagaaaaaaaaaatacatgccaaggcgggaggattacttgagtccaggggtttgaggctgcagtgagttatgatagtgctactgtactgcagcctgggtgacagagtgagaccctgtctccaataaaaaaaataggaaaagaaaagaaaaaataaaaataggagtttataaaggtggaaataatatacgtggtctaatattataggaaaatgtaaaatagataatctatttatgatatcccttggaaagaaaaatctgaaggtccctataggcaaggattaaaaggtggcacacgcaaatgtacaaaccaaaatgctgatttcattatgagatgggaccatggatttttttggtctgtaataaagcgcctgtttcatatttatcttgagtgggaaagtctcgattactcactgggctatggctgcatgaaaatatacagaattgtatctctagatcctgattctcaaagtgcttttttcttttccccagctaattcactgggcagaagttgccttctaatgggtctttcttcacggtctggcatttttaaggcaatcagaactttgaggatgttttccctgcattattgggccaaaaactatctgccctctctggttcttacgtttggtgtgtgcccaaaattaggaagagcaaggggaaaggagaaaaatgtcatcctgcatagagaacaacaagttgtgccgagtgttctgagggaacattgcagggcagatggattgttctggatgttcaggatgtgtacccttcttacttgaggggaaggagggcaggaggcttgacaaggaagccaaggaggcatagaatgtgcgttgtaagccaagtgtggccactctgattcctttcccaagactttgaacctcgaaggagtgatgctcaagttcaggggtagttagagattgtgttcattatctattgctgggtaagaggttgacctgaaacttagtggcttgaaacaagaaaacatctattatctcacagtttctgtgggttaggaatccagaagcaacttagctgggtggttctgattagatcaccactgggatcaatgtgtcagctggggctgaagtcatatgaggcttgactgctgcgggagggtccacttccacttccacttccactttcacttcctatgtggctgagggctggaagctttgaatccttgccatatggacttctccataggctgcctgagtgctgagtgtcctcacgacatggcagacagctgcttccccagagggcctggagacagtgcagggggtgggggagaggggagagagagagagagagaggagagaagagagagaaaggagagagagaagagaaggagagagaaagaagagagagaaagagaagagagagagaaaggagagagaaagaagaaggagagagagaagagagaaaggagagagagaaagaagagagaaagaaaagagagaagagaaaggagagagagaaaggagagagaagagagagaaagaagacagagaaaggagagagagaagagaaaagagaagagagagagaagagagagaggagacagagaagggagagagaaagaagagagagaagagagaaaaagaagagtgagacagtgcacacataagatggaagcctcagtccttttatttttatttaatttttttgtagagatgaattattgctgtgttgctcagctggtctagaactccttgctttaagtgatccttcctttcttgacctcccaaagtgttggaattacaggcatgagccactgcacctgacctcagtgggtttgtaacctaaccttgatgtgacctacactcacttctgctggtttctgttggtcacacagaccaaccctggtacaataaggaaggggactacataagggtgtgaagaccaggaggtagggattgttgagggctgtcttggaggtaggctggcacagagatggtttatagaacttttctgtggcagagtctcatctattccctgcctcctgtggttttgcctgggtgcctcccttgagccttcctgtcggctctctgggctgcccaacaccctttcaatagtgtcctcttttatttaagttcactgctacatcttctcttgtttgcaaggacaactctgattagaacaggtgctacaagagaggacagtggcgggggaggtgggtgggtagcagaggaaactcattttagataagatggtcagggaaggcctctctgaggaggggccacttaccctgagacatgaatggtgaggaagagtcagcagatgaaaggtgggaggaggggcgttttagacagagggggcagcatagccaaagctctgcggtgggaaccaaggttgccaatggccaggtcacgcagcctcttgaggtcacagtaaaaacttggatcctttcccctgcaaccaaagcatctcttcttccaaacatcagagtctgggagggctgaggaccaggctccaggcctcattgtgcggggatcagatcagccgagtaagtggctttaaccagataaggatcaagacattctctgctttgttctcgcatctgttttgccggctcttgggttttccaaatttctgcttgggttcttttctgagtttcttagttccctttgataaattcccacgtgatactggtgagctaaagggaaagctttttgtccatagttaggcctgggaatcccagctagagagccctgtcatcttatggagatgggctgctacccaggacggtgtgggaatgggcaggtgggtctgagggatcccttcagcctcattactctatagttctgcgtttattcaacaaatacctgttcagcatctggcaggtgttcagactctgtgtgggtgttaggttaagaagataaaggaggcactgttcctcctctccacaattcaagttagaagtgagggatggcctgatccaaaggcgattgagtgcaaattccttgttccttaggaatcagccacatggctggcccacagccaaagccaacaggtcctctgtaccctgtattttagggagccagatagtttccctccaggtttactaaaggaggcagaactcgctttacacccacagcccaaaattccaatttcctcttccttgcccatacagcaatcttggggaggaaggaggtccttggttttactgagtagtcaggtgttcataggagaaggccatttcctccctccccgttaagggtggggtagtggaaattcaaaggaagtccctcatggagactgagaggtgactgcaagcatggggtgctgggatgctgttccctgatgggtggtggactgtgggcagtggactgtgcctatctgagcagggtagaggagaggtgagaagaggggcattgtggtgtagctgactggatgcgtgagcttctctaggtcaagtggacgttgcagtaatcagcctggctggagcacttttctggtggcctactcaagcaggttgactgctgggcaagagggtcaggacactggtaggccctaggtggtggggtggggtaggcgaggtcaagcctgggctggatgaccctgtgagagaattgtgcagtggagaagccgctaaggaacttactcatttgcccatgagaaaccatatatggacacggggttggggtgggggtggtagggtatgtctcccaatcagaccatccgccccacctccaccaagtccttttcctcctagcaggcagggtcctggctcaagttaactcttgaatgagtaagagagaagataaaatgagatttaaattgagtttgagaataaaggtctaaaggatggaggtttaacaacagaaagtgatccaaaagtaatgcaatctgcccaaaatgtcattaagggatggaaaagggagattcaacacagcatggctgaaggcagagattaggggagaaaatcttcatcattataccccacagagttgaatcgcctcaatacactggctccacaagtaaacagaaaaattgaaatacagtgtggtcgggctagagtcttgcttgggtaaagctgccccaggttctgagagagcacagggggataggttggttgttagagagagatttccagaggagggttgcctgagatggaccttgaagggtgagaaagagttggccaggtgaaaggagagtggcagtgggaagggagctctccaggcagaggtgacagcacgggacatctggggagtggggctggagcatgaaggggaaggcaggaaggatgcttagagatgtacaccaggaggcccatggccttgcagctctgcaagcttaaggggtgagggccctggagagccactttaaaccttggagcaacacaattggatttgcatattagacagaacactctggatgccagattctggcagcgctgtggacactggacctctaggcatgctcctcacccattcacctggcactgtgaacccacctccctacaaaggccatttcatctctgagtttccaaaatcctggctccctactcttttgaatgtcctttgccccattcctattgcagaacccttcattgttccctttttgattggcctccgaatattgccactttcccttaaatcatcttctcgctttcctcctccagcacactcttctcagctcaacaagattctaggccttctctgggcctgtgcccaccagcacatgcctcctcaggatatgtatatactaaaatatcttccctttatcttatctggtcttcgccccatggggcaacccgaaggctaacatttattccttcacacattaatttaagctgctttaattgctgctatgatatgttttatataatataattaatgttttaattctgtgtacttgcttccccaggcagttttgtgaaaggcccaattttggaatcaagcaaataaagaataagtaatggctgaaatcattatagtaacacccctctctcaaaggatttaaaaccgtgcttgtttttttcaaagtatgttaaaaagggaaaagatattttaatcttctctccatcctgggcatgtttgggtggctttaatgaagttccctggaccctgatttcaagagtttctggccttttggtatctgaccaccattctcaagaggccactgcagcttgaggtctgtgttgagattaccagcttcgcaccccctgccaccaactctttgtcatgattggaggctgtacttaggatgagaagttgctgaacccactcattcatttattcattcattcagcacccatatattggtgtcctattatgtacctaggactgggatagatccagtcctgccctcagggagctcacagtcaaatgggaccaggcagaaggagttatgagctggcatgctaaatgctgtggcaacacaggggaggaggcagggtgggatagagtacctacctctgcctcagggagttggggaaggtgtaagaggaggcaacatttaaactgtttaagaaaggagaaggaaaggaaggaaacatcaagagcaatgagataaaccgtaaggaaaaaagattgtgtgcctgggaagtggggagaggctgaagccagtgtgcatgggaggacgtggcaggaagtaagcatagaaagagaggttggggctgagtgaggaagggtgtgctttgccaggataagaaatttggatcatcctgagggtgcagggaaacccaaagaggcttttatgcaggaaagtgtcccagtcgatcagatctggagtttatcaagagaatcgcagcagtgtaaagagttgcctggcacatagtaggtgctcaataaatcctgtggaatgagagaggctgttgggacagtccagatgaaagatggcaccctctgaattagggcagtggcagaggtgacagaaaataagggatggatcctagaggcagaatccacaagacttgcaaatgtgcccttaacagcagaagccatgagaatggggttagaagtgtcctcctcttccatcctccctgatctgtgaggtctggcctcttgtcctcttccagaaattgagagcttggagggtcatcacctcaaccgttgtctagttcaagctcctaagttttccttggagaaaaatttaggcctaagggaacacagtccttcagaggcagaggctgcaccagaacccaggtgttccatgctgcaaagcagagtgttaacactggttcaagaacatcttgagggccaggtgcggtggctcatgcctgtaatctcagcactttgggaggccaaggcaggcggatcacctgaggtcaggagtttgagaccagcctggccaacgtggagaaaccccgtctctactaaaaatacaaaaattagctgggcgtggtggcgccagcctgtaatcccagctactcgggaggctgaggcaggagaattgcttgaacccaggaggcagaggttgcagtgagccgagatcatgccactgcactccagcctgggcaacagaatgagactctgtcaaaaaaaacccaaaaaccaaaaaccaaacaaacacccaaaaaacaaaacgaaacaaaaaacaaaaaaacaaaagcacgtcttcagagttcatgaacccaggaaatgtaggcacaagtgtgtgtgtttctgcaaaatgagagggtcccgagtttcctaacatacttaaagtgttttatgatgccacaaaaggctggcccactctttttttttttttgagatggagttttgcactgtcgcccaggctgaagtgcagtgatgtaatcattgcaatcatggctcactgcaaccttgacttcttgagctcaagcgatcctcctgcctcagcctcctgagtagctgggactacaggtgtttgccaccatgcctggctaacttaaaaatttctttattttgtagagatgggggtcttgccatgttgccaggctggtcttgaactcctggcctcaagcaatctccctttttggccttccaaagtgttagattacaggcgtaagccaccgcgcctggcccccacctttatttttatttttatttattatttattttttttttttttgagactgagtcttgctctgccttcgaggctggagtgcagtggcacgatctcggctcattgcaatctctgcctctgcggttcaagcgattctcctgcctcagcctcccgagtagctgggattacaggcgaacgccactacatccggttaatttttgtatttttagtagagacggagtttcactatgttggccaggttggtctcgaactcctgacctcaagtgatctgcccgcctcggcctcctaaagtgctggattacaggcgtgagccaccgcgcccggccccactcttaataaatgcctgtctccaggtgctgggtgggaggtgggatggaatggaatgaggtgaggacgcatggatgcatggatgaatggatgggaagttgagacgacgcgcccacacgagggaatttcctttgaaagagagcgaaattctgagttgggaaactcttccttgaaacgcctccccataccccagctgtggccttcccgttttctgcgtggtggtgtggggggaacttcctcaggcctctccgcagtggagcctctttcggttctgccaggatacctagaggcagcggagagcggggcagggaggggaaaaccgtgagggtccctgtggcaggccccagcacccatgggatctctctccggtcgcaggaagcaggctagctcctagcccgcctcggcttggcctttgtgggacctgggggcaaagaagaagagctgtctctgggaccatgcctcctcccgtacacagcaagatgcgtccctaaactcccgggggaattagacttgtgggaatgttctggggaaactcctgcgcggtgaattgctgggggctccgcccccccgataggtggaccgcgattggtctttgaagaccccgcccctttcctgggcggggccaaggctggggcaggggagtcagcagaggcctcgctcgggcgcccagtggtcctgccgcctggtctcacctcgctatggttcgtctgcctctgcagtgcgtcctctggggctgcttgctgaccgctgtgagttgtttttgccccgaccagacgggagttgggagtggggaatgagaaggaaagggaaggaagacttcggggaagaggccttcctggctgatttttgtgggggcaggagggtgggtgggagctgggcaaggtgcccccgctcctggctgaatggggtgggctgcctctctcttctcccgggctggggtcccgggagcggcctacaggggccgctcagggaaggcactggctgcccaagcgtgcctagacggcctggacgggtttagggagcctcagaggctggccacacagagactggtagggggttcagagggcgggaagtgaggcggaccaagggaaggggcgggtctggcccgtttcctgtccccttcttattgtggacagatgccagcctctgtaagtagttatcatctccttgccagctggggctgccttcttccagggcatcttgtgggaacaagagatgggtgcagaggcccaggtacttttgtgagaaggcaaggagcttttaacatcgccttccaccccgaaccgtatcttgggtgttccaacctaggaggaatccccagggctttgcctttttctcctgaatttaagatgacataggagacccctggggagatgaacagtttatgggacacaataaagggttaggagaccagagttctggttggctctgacagggctggtgatcagagggctggagaaaccaggggtttctccaggcaccagaggggctcagagccaaccaagcatatctccgggattttcagaagcctacacttgactcactttttgtttaaatgtatttttgtagttcctcattctggaggctgggaatcccccaagtacctggctccttcatcccagcccctctggcctccccctactttagagggctgtagattcctgcctgaagcctgggcaggaatgacccatggtatcaaggaaagcaagggaagcagcaagggaagagagggagtggggaggctgctttggtcccacagctttcactttcacctgaagcaatggctcttagggaacagggaggcagggggagggcggagctggaaagaggtaaaggggggcccttgtggtaggagtggagaaagagccagaggaggtggggtgaagggtgtgatccaggcttctcaagagcagagtttgccctcataactcccaactttggctccaggtagaggctgggctgtgacaacaatgtcagaagctatctattgagggcttcttgtgtgtcaggctctgagccaaacactgcctgttttctttgtctgatttctcacaactcccccattatacagatgggcaaattgaggctcagaaagggggattgtcttgccaaaggtctcatagctagctaatggaagaacctggttgtgaatctacatctgcatgattcccgagcctgcctctcagatagtgagagtctccaagctctggtcctgagctgttttgtggcagaaggaccagaactatggggagtgagaactggagattgacagacttttaggggagcgttttatttctcatgtgtttgaagatggtatcaaggactttcctatctttgggagtgtgggagctccacgttcacaggatggtgtcttgcaatgagctggtggggggcagtagccttttctacttcctttcccattttgggtaagacacatttctgtaagtaatttgctgagatacccaggttgaatgagagccaccagttaggtaggattctggacagccagccaggtagccgggctgcttgccatatatcatgcaagcagaaacaaatgaatgatgattaaaattgccatttaatgagcacctactatgttcctgacactgtgctaggccatatacatgtattctttcttatcttcgtaatccaacctgcagggcaggcattattactcccattttagagatagagaaactgaggctaagagaagcaaaataactagtaagtgttacaaagtcaggactggagtctaaagctgtctgactctcaaacttgtgttcttttcactggctgttcccaaactgtgggacagttttaaggagcacatggacatagaattaaacatacacttactttacagttcttttaaaaatccttctcattttttcaaagaggaagtctctggagctagaatagagttaatgcctctcaaaggcttgctaatccttcttttaaaacaaaaatcaagagcaggcctgggagggccttcaacaagcaaacaaccagctgggttttaataaccttgttttgtttccccagaatttatttttagggttaccttttatttatgagaagtgatactggttcttgtctcttggcaatgatgtgaggtttacatttaaagtaaatgtaccggccaggcacggtggcttgtgcctgtaatcccagcactttgggaggccaaggcagtcagatcacttgaggtcaggagttttagatcagcctggccaacatggtgaaaccctgtctctactaaaaatacataaattagccgggcatagtggtacacacctgtaatcccagctactcaggaggctgaggctggagaattgcttgaacccaggagatagaggttgcagtgggctgagatgatgccactgcactccagcctgggcgatggagcgagactctgtctcaaaaaataaaataaaagtattgaaattaacaataagtaattaatagcatgggtggtacctggatgtagtaaaatggtgaagatgaaacacaagttgatggagagaggagcattgagacctgagttctcatttggactctgtcactgtgagactctgggcaagtgaccctcctctttggtgctcagtctcaactatctgtaaaatgaaagtgtgagtttacccttccagctttacattctagcattttatgagggaagggctggatgaacagatgatgaggagttggaggaagaaaacatgatgggctttggaaaggagcaggaagggaagcagaagaataggaggaagaggccaagtgctaaacatagccccaaacagcactgggaccagctgaagtcagccagcttcaggactccaggggagctgctggagtccccatatcctatgggatctttgggaagaggaatgactcaggcatcaagccccaaggaattctgttctgttcagagaatattgtgagtttacagtaccattgctttgtaaaaataccagaatgattctctgggtgcgattataatcagctcagttgacaatttacttgaaaacaaacatgccaaatatcatgcaggttccactttctgttttgacttgcacttcagtttgcagcctctgtcctggatgacttttacctttctgctgaagaagttgcaacggagatttcaagatcccttcaaattgcacaattctgtttttaggtccatccagaaccacccactgcatgcagagaaaaacagtacctaataaacagtcagtgctgttctttgtgccagccaggtgagatgccaaccctctagccccatcatggagtccccctttgctttggtggcagacgcagaccccatatgttaactgtaaactcaaatctgaaacgacccatttcccagccctgcttcactgtcagaatgttctggttccctctctaccaggtaaaactctgtctaccctgaactagggatcccagcttctccatcttcctcgcctgattatgaaggatccaagactttcatctttgaatcccctaccctaaagcctggcctgatcattgtgtggttagtgtctgactcatggagttggccagagccctccctcatttcctgatgttttccaggacagaaactggtgagtgactgcacagagttcactgaaacggaatgccttccttgcggtgaaagcgaattcctagacacctggaacagagagacacactgccaccagcacaaatactgcgaccccagtgcgtgcgctgttgggaaagggacgcttgggaaccgggctgatattcccgacaatgcagccattctaattttatgtagccagggtctgctctgattggttggagtccgggctgtactgatcattaaatgatttgattgccatctctacttggaagagggtctgaggaagaaagagcaggcaatgtggggagtgaggctcagagcatggcccagcagggggttcccatccttcctgcccttctcttctcagacctagggcttcgggtccagcagaagggcacctcagaaacagacaccatctgcacctgtgaagaaggctggcactgtacgagtgaggcctgtgagagctgtgtcctgcaccgctcatgctcgcccggctttggggtcaagcagattggtaagtggctcatctgggaatcagttttggagggggacagaggagcttagggcccaaggtgaggggctgggcagtgggcacttagccccagaggcagaggaagcagaggctccaacctatgtcggtatccccactggagtgagctgcagacgggaccttgttcattctgccttctgccatggggatctgcctttgaagggcaatgggagaagtcctcctggggactgcagctgtcgggggcagtaccacatcgggggaagagtgctcaaggcaggagctcttcccgtcctgcctggccactggctgccttgtgagccggacaggtggtccactgtgatggttaatgtccccctccccacccactcccagctacaggggtttctgataccatctgcgagccctgcccagtcggcttcttctccaatgtgtcatctgctttcgaaaaatgtcacccttggacaaggtataagcactcatcccttgtgtttcctgctctaagagtggcatggagctgcctccattctctccagccacctgtcctgtccctgctcccagaggtccacacacactcatgtacttgtgaagcatctgcagagtggcctcatggccaaccagacaggcacatttccacattttttttgcctgctgtctctttgaggtaatagacactgttgatctctcgcttcatgagagcctcctatcttgggggtattgggacacttattttagctttccttctgcccctcctgcttctcctcagttttcctcgtcttgctttcaccttacctggctttctagggctttctgggctctgggtgctcaccctgagggcctccctctcttacctccaactccaaacccacaccaggtcctgccactggctgtctacgtgttttgggaacttactgtctccactgttgtcactttagtttgggcctcatcactgtggtctgggtgatgccttttctgcctcctggcctccctgcctctgtctctcccctcctgctggttctgtctccatcctcttgccaacatgagcgttcgacagtttctttcaaatcatgacactctcctatttgagatgcttcctgtctctctgttggaactaagactccttagcatggcacccaaccttcctgttgcatttcctgctctctttcctgcatcgcatagcttcatgctacttgcaatcctctgaacacactgttcattctcttccatcaaactcatctgcctggaataccttaaacatgggccccaggccaggcgcggtggctcttgcctgtaatctcagcactttggatgccaaggcgggtggatcacttgaggtcaggagttcaagaccagccagcacaacatggtaaaaacccatctctactaaaaataccaaaaaattagctgggtgtggtggtgggcgcctgtaatcccagctcctcgggaggctgaggcaggagaatcacttgaacccggaaggtggagtttgcagtgagccaagatagcgccactgcactccagcctgggcaacagagcgacattctgtctcaaaaaacaaacacctgccccattaactttttgcatttgatttttaaaaatgggcaagataggcacatgggacagaaggcacaaaagagccaaagtgatgtctttctcccatccctgccccttaggctcccagttctttctggagggagccattgttccttgcatatccttccagagattctacatataaacaaaccaacacacacacacacacacacaaacacacacaaaatttccctccttttacttttgcacaaataggagtatacattttatttgttaactgtctgcctttccctaatagattgaaaattccttaaatgtagaaacttggccttttttttttcttccattgatacatcccctatacctggaacagtacctgacgcatggtaggtgcttaaatttttactgataaatgttgactgataactggaggcaccactggtatagtttttttttttttttttttttttttttttttttgagacagagtctcactctgtcgcccaggctggagtgcagtggcgcaatctcggctcactgcaagctctgcctcccaggttcacgccattctcctgcctcagcctcctgagtagctgggactataggcgcccgccaccacacccggctaatttttttgtatttttagtagagacggcgtttcaccgtgttagccaggatggtcttgatctcctgacctcgtgatccgtctgccttggcctcccaaagtgctgggattacaggcgtgagccaccgtgcccggccaccagtggtatagtattaatggaatcagtgcattggcttacgtatctgattacagctcagtaagtgtgtgaccctcactgagcctcagtctcctcatctgaaaaatgggaatgaccttcatttcacaaggcttgagctaaaaacatgtaaagtgtattgtaaattcctgaatgctctactcatgtaagactaaagtaggccgggcgtggtggctcacacctgtaattgcagcactttgggaggccgaggagggcagatcatgaggtcaagagatcgagaccatcctggctaatatggtaaaaccctgtctctactaaaaatacaaaaattagctgggcgtggtggcgcacatctgtagtcccagctactcaggaggcggaggcaggagaattgcttgaacctgggaggtggaggttgcagtgagctgagatcgcgccactgcattccagccagtctggcgaaagagcaagactctgtctcaaaaaaaaaaaaaaaaaaaaaaaaagactaaagtacatggtttcttcaaagcttctctctctttctcccaccttagatgatttttcctttgcaatgtcctgtgtccattccgccccactcctcctggggccacctggaccaggtcttcatcatctcatatctatatgtttgctgtgtctcctggctggccactcttctgtaatttctcctcctctgagctctctgggcagctgaatcttctcactagtgaagtcgcctggttggatgctgatgagactgaccagctgaatccagttgaaaacttcacacttggcagtgatctggttctaaagacacaattttccatagtttcctaacaccatcctgcatgccacctgccttatttccccacatcacatcgtcccacttagcgggactgcactgctgatccaaattttacatcctttagggcccactcaggtcatatgtcctcagggaagtctttctggaagaaccttaaaccagaggttctcaacagggggcagttttgctccctgtggaacgtttgccaatgtctggacacatttcattcgtcacaaacggagagggggatgctacagggatctggcggatagaggccagggatgctgctgaacatctgcaatgcataggacagcccacccccacccccacacccccagtaaataatgatccagcccaagtgtcactggtgctgacgttgagtaaccctatcttaagctgaactcatcatctctccattccagccttggtggattctgtctcctctgaaccattcccatctcactttagcctacctagatcacaaagcttggcactcattatagactcccctatttattactccttcaagatgtgcaagaatcttttctctgcacttttaagttctgtaagaagagtctgtgtcgttcctataataaccagcataggacgttgcacgtgttgtgtgctcagtgaacctggatttgttgattgttgactgactcactctagagttggaaatcttatgcttggggaaacttaatatctctttctttctctgtgtgtgtgcatttgtgcacgtgtctgtgcatagctgtgagaccaaagacctggttgtgcaacaggcaggcacaaacaagactgatgttgtctgtggtgagtcctggacaatgggccctggagaaagcctaggaaggtgggaactgaagggggagatgaggcacacaggaacactggatgggaaaaaggggaggggaggcagtttgggggtgtggtatcacagctctgccacttatcttgggagtctgggcaaatcacttcccctctcttagcctcagtttcttcatctgtaaaatgggatgataacagcacttccttagtaggttttgattttagagtgagaaggttggcctacagtaaagatcagataatgtaaatcagtgaaaaaggtcaggggtaagaaaattacattctctttacctaacgctaaatgaccagttaatgggtgcagcacaccaacatggtacatgtatacatatgtaacaaacctgcacattatgcacatgtaccctaaagcttaaagtataataataataaaatttaaaaaaacgaaaaatacattctctttgctttttctcaaaatgtactttcctctttgtagggctgggactagaatgaggtgagcaaggcacttgccctcgggcgcaatatttaagaaggtgccataaaagtgtagtaatcaaggtaaattcattttgatgcaatatttttaaaaataaaaattaatgcaaagaaatccatgatgagcaagatagcaacattttaaataaagaacaggatccgaccctgtgtttgcatgaccctgcctcactcacctcaccctaatcctggccctggttccagtaaaaggaataggcagccagcctgcaggccgtagtttgctgacttggtgtccgcctgatgattttcaaaatatggcattaaaagaatgtttaccttgatgactgagtgttttggacatccttttcaattttgtcctgaaacaatttcatcccttgcctcacgctagtctccgccctgccttttggtctttcttttattttcccactttgaaaaaaaaattcggcatgagaaatactttacctttcccctccactcttctataccaaaagcaacatgcagacatgaatcatgctagacctcggcattgggcagagagcagggagtggcggggagcatggtgagcaggtggtgacagccactgccaccactcgcttctagatggttcccaggtggggaggctgccaactggaacccagtcttcccagtttgtaagagaaatcagatgtctaggtttgaatatgtgatctcccagtttaaaaatgtcggcaaatatttccaaacgttaagaaaatgttctggctcctttaaagacatctgccagccacatttccccaaggaccgcggtttgaaccttctgatgtagatgagctctgacattggaagattctggagtctgacaagtcacagcaggttgagggtagggagaaactgcaggtgaggggtgcatgctgaagtcctgatttctccaggtccccaggatcggctgagagccctggtggtgatccccatcatcttcgggatcctgtttgccatcctcttggtgctggtctttatcagtgagtcctcaggtggggaggtgttgggggagggaggggagaccacctgtttcttatctggcctctccaactccccatcctttttttttttttttttttttttagaaaaggtggccaagaagccaaccaataaggtaggtcacccctgagaacccgggacagagttttgacaaactgggaagatggcctcacggttgcctatggggcagtaaaactgattcagagtctgtctctgcagccagtggggtggcagcagaattggggactgtcatccccacccaccatgctccttccatccagagctcaatcccccacagaactgcccctggcaccactggcagagcctaacactggctgttcttcactcctttcctggcattcaacgcgtggggagctgcatctttgggccttggggctgggtcaaatgggtgggagcaaatgtggcagccccttaagcccactggctcccactctggaagctcttcgtcgcccttggtgtggccagcagggggcaggaggcacccgaggaatcagcactgacccgccgtctgggaaaggggggagggcttggggaagggatccgcttcccagggaggggctcctcagaggcacagctgcccctgctgctgggggtgacctcacaccttgcctctccaggccccccaccccaagcaggaaccccaggagatcaattttcccgacgatcttcctggctccaacactgctgctccagtgcaggagactttacatggatgccaaccggtcacccaggaggatggcaaagagagtcgcatctcagtgcaggagagacagtgaggctgcacccacccaggagtgtggccacgtgggcaaacaggcagttggccagagagcctggtgctgctgctgctgtggcgtgagggtgaggggctggcactgactgggcatagctccccgcttctgcctgcacccctgcagtttgagacaggagacctggcactggatgcagaaacagttcaccttgaagaacctctcacttcaccctggagcccatccagtctcccaacttgtattaaagacagaggcagaagtttggtggtggtggtgttggggtatggtttagtaatatccaccagaccttccgatccagcagtttggtgcccagagaggcatcatggtggcttccctgcgcccaggaagccatatacacagatgcccattgcagcattgtttgtgatagtgaacaactggaagctgcttaactgtccatcagcaggagactggctaaataaaattagaatatatttatacaacagaatctcaaaaacactgttgagtaaggaaaaaaaggcatgctgctgaatgatgggtatggaactttttaaaaaagtacatgcttttatgtatgtatattgcctatggatatatgtataaatacaatatgcatcatatattgatataacaagggttctggaagggtacacagaaaacccacagctcgaagagtggtgacgtctggggtggggaagaagggtctgggggagggttggttaaagggagatttggctttcccataatgcttcatcatttttcccaaaaggagagtgaattcacataatgcttatgtaattaaaaaatcatcaaacatgtaaaaagaaaaacgggggtgaacatgctgggtgacatgagctatttaacctgctgtcaggctcacggaatgagggcattttctgtagataaataagaatgtccccaggctgctgcccctccagggtggtttccatgtgtgctcacatgtggtattgagattgcaaagtgctcttcccatttgattcatgttcacaaaaatagccttccccagcagggtgggtctgcatccctccctcttttacagaggtggaaatgaggtccagagaggcgaagtgacttgcctgtggtcacacagcggtgtctggtggtgccatgctcagagctcctcactctgggtcctgagctcctcccagatctgcctgctgtctggaactgacatctgtagctccttcccagggagatcctgggtctctcaccgccttctgacctccctgtggctgcaggagctactgcttctcggtcagatggtatccccttcccccaagcagtatctcaggataaaaataaaccatcctgttctcttttcctgctgagccaactgagggggagcctagccaggaggagcggcagatggagtgggagcagaggggaggggaggggaggaaggttggaggacaaggaggagaaggaagagcaatgcaaagtgccatgcagaaccccggcacaaaggttcgaggtgaggtttaacccaggggtctcagcctttcccaggaaagaacctgctttggatttccccaacacatcctgctggctggagggtgtggggcgatggggggcaaggggagatgtggagagggcttatcccagtggaggctgtgagggcagctgcgagccaagagaggggcacctggcttggcaggcttcccagaagagcttcaagaaccatttggatacaccaggtggaggcctttggtttagaaagtggagcaaagtggtggtggcggggaaggggaactttgggacctaattcttgtctcttatctagagcctaagagtgagtgttgttcacttctttggtggtatggtggaaagagaccaaagacccacgcctgccacagatcatctgtgtggccttggatgagtcactttcactgcttcacttctcagtttccctatctgacaaatggtgacaatatctgcagcagacgctattgatgcctcctgtgttctcttctaggtcagagcttctcaaatttgagtgtgggtcaggcgcagtggctcacgtctgtaatcccagcactctgggaggcttaggtgggcagataacctaaggtcaggagttcgagaccagcctgaccaacagggcaaa[134 bp omitted]ccactgtactccagcctgggcaacagagtgaaactccatctaaaataacaacaacaacaatagcaacaacaacaacaacaatagcaacaacaacaaaacttgagcgtgtatctggaccacctgcaaggtggtcctctccactattttcagaactggaaggatccttagaactcctagggacccatcatgcatccgggaacaaaagcccagaactgagtaactttcctgaggccacatagaaagctcctggccaatctctgtttagaaccagaacgtgctaacgctgccaagaataaccacctcttcttgttaaagatcgtggggccccacctcctgtgtttctgattctgtgggtctgggatggagatcaagaatttgcattctaagaagtttcccaagtggtattgatgctgccggcccagggtttatacttggggaactactgccttcatatttctttctttctttctttctttcttttgaggtgttgtcttgctatgttgcccaggctggagtgcagtggtgccaccccagctcactgcagcctccatctcccaggttcaagtgactctcctccctcagcctcccaagtacctgggactatgggtgtgcgccaccacgcctagttaattttttgtatttttagtagagacaggggtttcaccatgttgtccaggctggtcttgaactcctcacctcaagtgatcctcccgcctcggcctcccaaagtgctgggattacagggtgagccaccgcgcccagccagcattcatattcctatactgtgtaagcagccagtttctgactgcaagcactggggatcacttgcctcagggcttttccaggtcttgaaaacatgcttggtgcagaggcaggccaggtaagctgtagatgggggagttaattccccgaagtactttcagccagccaaggttgaaagtgggaggataaatactcaagcttccttgcccttgggagggacaaatgtgagctgtgttctacagtgtctccgaggctccctggagggactgagctatggaacctacagtgggcactctgcactgattcccatcctttccctgtctcacatcccctctccaccactggtgcttcccgggttcaactcccaaataaacgacctgcattcatccctagtctcaggatctgcttctgggagaagttccccctgagaatcagcagagcccatgcacaacaatgtgcaattttgtttttcttagcgtccctaatgaagggaagaggtggttattcttggcagcgttagcacattctggttctaaatagagattggccaggagctttctatatggcctcaggaaagttactcagttctgggcttttgttcccggatgcatgatgggtccctaggagttctaaggatccttccagttctgaaaatagcggagaggaccaacctcttcagggtgtagggtcctgcccggtgcgtggacggagggggtggccgtgaggcgcgcatcagccagaaggtggcgccaaggtaacgcccgaagaccctggcggcggcttgggctccctgagtaaagttgggtttgctgactcgccccacacccgcccacacttggaagaggagacctttcttcccttgaccccatcagcctgagcctcctgaagcttctactctgcaacttcatccattcccaggtctcatccttgtcatgaatacttccttccttaacaaataccagctgcggtcccactgtgtgccccatccggagctagggttgtgcacagtgacactgctaagacactgagtgctcactatgtgctaggcacagcgctaaggactttgcatgcattgccttaatctttatgacagccctgcgtaagacgtggtctcttacaatatactttttacagatgagatgcagaagtcaaatgacttgctaaggtctcgagagttagagctggaatttggacctaattaggttgactcaaaagcctgaggtttttgctcattcagtgagtaggaaagtaggcatatgttgcggggtgatgtaaactcatgcccgcaggggctggagaaagggctgggagtcaagtcaggtggcagacgctaggcaaaatggagaggctctgcccatctttgggggacagcctccattggctccttccaatggttgccgagcaggaatgagggttgcagattgtctggaatctggatttttttttttttttgagacagagtctcgctgtgtcgtcgcccaggctggagtgcagtggcatgatctcggctcactgcaagctccgccttccaggttcatgccattctcctgcctcagcctcccgagtagttgggactacaggcgcccaccaccatgcctggttaattttttgtatttttagtggcgatggagtttcgccatgttagccaggttggtctcgatctcctgacctcgtgatctgcccgcctcggcctctgaaagtgctgggattacaggcatgagccaccgtgccaggcctggaatctggatttttatgtgaactcttactatttttaaattccaaaaattggtcaaaaaatccacaaaagtggccgggcattgtgctcacgattgtaatcccagcactttgggaggctgaggcaggcagatcacctgtggtcaggagttcaagaccagcctggccaacatggtgaaaccccatctctgctaaaaatacaacaaaatttgcggtcatggtggtgcgtgcctgtaacccctgctactcaggaagctgaggcaggagaatcgcttgaaccctggaggtggaagttgcagtgagccgagattgcaccactgcagtccagcctgggcaacaagagcgaaactctgtctaaaaaaaaccaaaaaaacaaaaaaacccacaaaagcttggtgagagcatgggaaagcatgtcacagacggctgggattaaaagagactggaaacttccctgtgtcctatccttttgtttttatacgtggggaaacagaggcactgagaaagtccagagctggctcaggcaacatgtcctgggcagcttgtctctctctgtgcccagccaggagttgaagagcccctgggggcttaggatccaccctgtgcaccccaggtaaccagggcctaaggcactgatgctctgggactgagggacttcccttgggagaggcctagttgtgtgtagatgtcctcctcattctatgaacagtcccccgacactcccacccgtgcagccccagccacaggcaggaacacacaccagctctcccacttaagccttcaggccctgcagtcaattcctcgggcagcagaagttattaaagaccctgcccccaaggacttctctcccaccgactgattctggcacagcaaattacaaacccatctgtaggggtggggagatgcagttttaatttgtaaaaacaaagaaagaaaaaaaagaaatctatgctgtggtcctggagttggggaaatggaggaagctcctgagggggctcctcctgggatgagcagtatggttaccgtgggtgctccaggagaagcccagcaaggtcggtgagcagcttgggcccagccagctacagccagtgggcagggggtgagggcgcctctctcttcctatgctcgccctcccttcctgtccctggggctccctgctgactggcacatccctctgggccttggtgcccagctagttctctgcctcccgctcactccagtgctccttcccatcctctgcagcatctgcccgcaccctccttcctgctttctccaatgctttctaactacctcctttcccatctccagctattccgactcaccttgttctcttttgaacaagtgttattattctgcctaattataaaagtcatgctcatgcaccacacccctcatccaagcaataaacaggaccagggaagtaagaccacttgtaaacctcccaccccctgctaaccacaagatatgggtccttctagacttgttttctctgagataaacatttttttttttaaacttgggctattattatatgcattgttttgtaagcagccttctttgcttagcagtgtacggcagacgtctctccatgccaattacatagaaatggacagcatggctttttttttttggtctcactctgtcactcaggctggagtggcacgatcatggctcactgcagcctcaacctcgtgggctcaggtgatcctcccgcctcaggcccctgagtagctgggactacagggatgcaacaccacacctggctaagttttgtgtttctttgtagagatggcatttcgccaggttgcccaggctggtctcaaactcctgggctcaagtgatccacctgccttggcctcccaaagtgctagggttacaggcctgagcaactgcacccagcaacagcatgctttttaattggtgcataggattccactgtagggctggatgctgattcatgaagaggctccatgaagtccctcctggactttcaggcagtgtttctctttccttttcctcatgagtctctccctggtgcctcctccgcttttcctctctctccatctcttcgtctcctacctcccattttctctccacctttcactctcccctcctctctgacttcatccctgagtccccacccttagtttctcctgtcttctcccctccacaccccactctccccagccctacccattccctctgactctctgctccctgcggagggtggggggtccatggtgtttaacaccggctcccacatcagacacgtgccatctcattagcgtgcctgtcccccaaagtgaggcaggcaggagccacagtagcagcgagaggcctaattgaatgtaactaattattcactcccttaaatgggcctgggagggacagaattactcactctgaactggggagacagggaactggccgctggcaaacaaatcctggggcctgtggagagggctctccttggaatactaattagggccgagtgatgggataaaatcagggacagagacgcctctccctgccctcccacctcgtctgggaaattgggggtcaggaggaggaagggactcttgtgtgaatctaattgaaggacccctgggaagtgttaatacggggtgggggcaggggaaatgaaatgctgagcctggggcttgaggaaggcagggggctaatgtttaatatggagagaggcgggagggcacagcagtgcctgagggaaggagctggcagcaaccccagagccaccaagagctgagggaaccccactggctcctgggaggaagcccttctcctcccaagcactaccaagtgccaggccctgtgctaaagaccggtgttccaaatcttcttgaagccctttgtgtgttggctcactccgtatctcagatgagaaaaactgaggctcagagaggggaagcggctccttcatccatgatcaggcagctagaacatgcagggcggggcctcggttccacctggctgcaaagcttctgttcctaacccctagaattacccaggccacatcccagaccaattagataaaatttccatggaggtggcatgtgacggtcatagtctaggcatcagtatttttttttttttttttgagacagtcttgctctgtcacccaggctggagtgcagtggcgcgatcttggttcactgcaacctccacctcctgggttcaaacgattctcctgcctcaatctcctgagtagctgggatgacaggtgcccgccatcacaccaggctaacttttgtatttctagtagagacggggtttcactatgttggccgggctggtcttgaactcctgacctcaagttgatacatctgccttggcctcccaaagtgctgggattgcaggtgtgagccgctgcgcctggccaatcatcagtatatttttttagagcttccctggtgattctgagattcagccagaactgaggacccctggtctggactttatttccctatttgagtcactgcttctatttcacaagtggcatccatccttctactgagccaacctgtcccaaaggacctctaggctctatctagccttatctctgggactggtttccagacagctgggagcacgcaagttggggcaggagggactgtgtggaataggatgagggagggttctaatgtccaggggtggacccagggtagaagacctgaatgcagccccaggagactctgggatgcatcattctgggcagctcctgaaggtcaaaggtgagaagtcaattagggattgtgcagatatgaaaagaaggacaaatcacacgatggagagacgtatagaatggagaggtatgtgtgtgtgcatgcgtgcgtgcacgtgtagtaagggagtggttggtgtgggtgggtatagtaatcgtgattcttgataccatttatgtgccaggtgcttttcccatattatctcatttggtcctgacaacagtcctttgaaggtgtatggtcatccttgcagctgagcaaggtgcagctcagaaaggttgagtaagcgtcccaaggccacacgcagaaccagtattcaatatctggctcccagtttcaaatcccatgctcctttctcctactctgccttgattgtgctattgcacttgtgatctcttctctagcaggtgttggtgtgtgtgcatgctggttaggtgtgcatgatgtgcgtgtgcttgtgtgtgtgttgctccctccttttgggagggacaaaacttccattctgcccagcacaatgcctcctgctgactagtgagagggaagaggaggggcacccactcctgcttcttgcccctgttccccagtgccactcagctggtgactgcctctcctgtggctggggctgaggaggggcggggcaaggcgggttatcctcccagccaagtgacaaatagccttatttgtaacaaaggtggagagacaacctatttctagggtggggaaattctctctttttcaggctttcaagctgccctcctgccaccccatcccctgccccagtgaaggtggcagggagagatgggcctgtcacactcattccccttccgttccgccacctcaagtgcaggggacttcatgggagcttcatagaggggcagcaaatttatgagcccaacaccgattccccgatcacctcgctggccaatccatctttctggagccagagatgaaatgaaattattgtgaaataaatccatacagatgatcgagggactggcagcagggggacagcaaggggtgggagccaggagctggggctcaggtgggagggctattgccactccccttggctgagacccagagaggggacttcactggctttccttcctttgatggggtggggctgcgttctgcttatgccaccaactctctatggagcctcttgcccaataggatccttatctaaggggctgaatgaaagaccctccagcttgtgatgggtcctgtgtcactcatgcttccaaactcccagggtcagagagcaaggagggagtgggaggggttgcattcagggtgaggtgggagtgaagacagagtcagagtcagggccaagggcctgggtgatgcttcccatatttaattacccgccgtggaggccccctgctgtgccaggtgttcgtgcctaagttttgggaatgaagggagacccaagggaaggcaccagtgttggggttactcaggcagcttggggccacagctgtttaccaggaggtttggaagtagttcaatattttaacaacctctgtagtaggacttcatattccagctgagttccgatcttggagcagggcgagggttggggctgcttggtgccctctccctcctctttgcccagcagtgtctgggatattccccacaaagatcctgcaggatggctgtgtctcaggctggtgcatcaggggctggcctcagagccaaagggtccacagtggacttgccaagcccagagtgccagagctttcctgcctcccctcccactttagccagctctcagggggccccccaccaccctgagcactgagctggaattggaggcagccagccggctgggatgtgatcattcggcctcctgagcaaggccagccctggccacagggaaacaatgaggtcccttgagtagtcaagggtctgctggggccactgggcaggacaggccctccctagcctgccctggtcttgctctgggaccttgaccctctccccttctgaggaaggagtacagtggctttgggggatgatgaaggccagacagccagaccctcagcacctattgatgttgctggctgggtgggtgtgtgtctgagtgcagccccgggctcacattaggtggggcgggggtggaagccagacatagactgctctggaaatgagatttgcctcgttatctgtgcttgctcagaccgagggccttgggcattagccagcccatccaaggagttaagaagcaggaggaggggcagagagccgaaatccaggctccagtggatagagcccctgctggaatgtgtgtgtatgtgtgtccctcggtggtttggatttgtggggttttgtctacaaaagtgtgtgtgttttcctggttagtgtggatgtcctttaaaagaatgtgtgtatagcactttgcctcctgctcatggtggttgctgtttctctttagtgtgtgtgtgtgtgttgctggaattaacacaagtatgtctgtttctggactgcacctgtgtgtgcacacccacaggctcctgttggttttgtttgtacatgccctgttcgcatcccagcccactcagaaggctgcaggcccagacacagcctaatggacagagccaggtgggcagggcaggctggctggcctgcacccagggggcggtgggtggatctgggcatcttccagaggcaccggcctggcagggaacaaaggggcaatcagtagagaggccactagagcacagctgattgaggaagaggaattaactaggagccccatggggctctgcagggggcgggggcggtggcccctggcattctgattaggagggggagcaggtgcagctgggcttacctgagccacaggaaggagttggagggggcagaggggaaagcctaggatgggatgaagtagagcagagctgggagctgaggacctggaccaatgactttgagggagaggagcaaggggtcctgggtgagaaggtcacagagtgtactgagcagatattgtcatcctaaatgggatccttgtcacctgtcatcctaagtggatcacactcccacttatccagagcttgctgtgggcctggcaatgggctaaacatctgccatgtaatcctcacagcacagaagccagttccatcatcagtcaggctcacacatgaggatgtggatgcccagagaggtaaggcaacttgctggaggacacacagctatgaatccaggtcggctcggctttagggtcctcattttaacctctatgccaccttgccactccccaggcctctgctgcattgccagtggggagatgctacaggaagacagactgtggcacagaaaaagagggatgtacaaatccacctgaccaaaaaagcagcctgatcctggagggggtgaaatgcctgacactggaggtatgcaaggaatagctcactaacaaaggggttccttgctggataggtggttggattccattctctccatcattgtaatatggattgagtcagagtccccgggtttgaatcccagctccaccatttattcactgtgtgatattgggcaacttgctagacctctctgtgtttcagttttctcatctgaaaaatggaggagtgtgaggatggagggtcagagagagctgggggaagaggtgggacttgggatgaacagaaagcaaggtggcaatgcaggtgttaggctctggggcttgaggggttgagtggggttcaggtgaccttaggttcagcttcctctgctctagcccagacctcacatctctcactggggccattgcttcagcctccatcctgcttttcgtgcccagcctctcctcctccggcccattctctgtcctcttcaatttgaccatgtcactcccctcatctgtagcctttaatgactcctctccccctataaaagtggttttcaaagtgtgtcaggagaaccccctgcgggttgggggataaccttaggtgacacatgatccaggtctcctgggagactttgcacagttctcttttgatcccaaggaggacaccccagtttggtgctggtttgtctttcatatcctttgctgtaggaagatcaggtcagactcggccaccagcaaacaactgagtctagttagaactcaataacgctgatttgttctaagctttgatttctacaactgtttccttctcaaacaccttctcctctgggctccccaatgctgcattttctcatttgccaccctgcttcactgcttgctcccggcaggtctcctgttttgctttttctgctgcggctggtcctctcaacgcaagtgtactatcaggctctgcctcattcctattcttgtctggagctccatctagtcccagagcattaaccactaccactgattctcaaatgtaactctcgacccagatcaatttccagctgccttcctgatatttctatttggatgtccaataggtatttctaatctacaagtcctaaacggagcctgtgctacccacgcctctgcctctccccttgcctgccttgcttcagtaggtggtcacacatctaggagttatccttgactcctctctcttctttgccttccccatccaatccattagccatgcctgtcaactttacctgcaaaacatattctggaatagccaattcccttcatgtcctcatgccctggtccgagccagcatcacccctcacctgcaggctgcagcagcctctgggctgatcatgccgctctcaacttgcatccctccaaacctaccacacggcagctggaggatcttttaaaagcattaatcagattacatcactcaactgcttaaaactctcaaagggcatccccttgtgcttacaacaaatccaagccctttgctctggtttataaggtgctgtgtgactggggtttttttctgtcagtttctcttactccatccatatccctctctcccttgctcactctgctctcgtcacattgccctgcctttgcccttgaacctactgagctcggtcccactgtgttccctctgcccagaacttctctcccttgatcttctcttcctttagctatctgctggggggggggtcacttcctccgagaggccttccctgagtactcaacaataaagccactccagacaccactgcatccctctcttcttgctttttgctgagcatgacaggtttttttttttgctttcctccatataattacaaactccacataagaaggaatgttacctgtcttgttcattgctgtattttcagtgccaagaatggtacctgaatcatagaagatgattattatttgctgattgaattaatgagttgtattttttacagttacctttgatgtatgacaggtgtcacttttttttccattttagatggtgacataggtttccttttaagaataaagcaaaaaaaaattctgataagagacttgaatatataaggaactcttataactcaacaataaaaagacaaatacaatgaaaacatgagcagagaatttgaacagacatttctccaaagaagacatacaaattgccaataagcacatgaaaagatgctcaacatcattagtcattagggaaacacaaatcaaaaccacaatgagataccattgcatttcaaactacaatgtgattatcactttactagaacggctaaacctggtgaaattggaatgcttgtacatcactggtgggattgtaaaatggtgcagccacttaggaaatagtccatcagttcctcaaaaagttaaacttggtgttgtcacatgacccagcaattcctttgcttggtatatacccaagaaaaatgacaacatacgtccatacaaatacttgtacacaaatatcgatagtagcattatttaaaaatagtcaagaagtagaaaaaactcaaatgtctgtcaatggatgaatggctgaacaaaatgtggtatgtacatacaatggaatagcatttggccataaaaagagatggagtactgacacaggctgcaacatggggaatcttgaaaaccgtgtgctaattgagagaagacattcacgaaaggtcacctattgtatgattccatttatatgaaatgtccagaatggacaaatccagagaaaaaaaagtcagtggtttccaggggctggggtagggaagaatgggaagaggctgataaaaggtacaggatttctttttggaggaaatgagaaatgttctgaaattcaatagcagtggtgcttgcatgactctgtgaatatactaaaaaccactgaattatacattttaaaagggtgaatttggccgggcttggtggctcatgcctgtgaccccagcactttggaaggctgaggagggagggttgtttgaggccaggagtttgagaccagcctggacaacatagcaacacctcatctctacaaaaaaatacaaaaattagctgggcatgctggctcacacctgtagttccagctacttggaagactgaggcaggaggatcacttgagcccaggaggccaaggctgtagtaagccatgattgtactactgcactccagcctgggtgacagagtgagaccctgtctcaataaaaaaagggtgaattttatactatgtgaattatatctcaataaagctgttataaaaataaagtgaagaaaaatgataatttaaagaaaaaggccaacagccccagtacagggacacatggatctttggcaaagtcatagaagactcatgtgaatgactgaagttggtttgtaggcttataaggataaactgcagacatcctagtttaacattgaagacctatgcttaactctagcttcgtgtgctgccctttttaaaatgactatgttgaccttatccctatttctggaacacttaggaatctttcaagctgctttgtctttgcaaattttgggccctccctgggatgtcccttctccttttcttcatctggttgaacccaagtcaatataggtgggcttgataggggatggggcatgtgccaggcactgagcttggtgctggtgagacagtgcagaggactaagacagatatggtctggggccttggctggctcccagacagggtgaggagacagatgaggacctgccacacccacactgggctgcaggaatgcagtagaagaacctaacacagcctgagagatcagagaaggcttccccagaaagggacgcttcagctgagtagttggccaggcaaagaagaggggaggagtgccccagatggagggaacagtctgggcgaaagcctcaagacagcgcgcagcaagttggaggaatcctcagaaggtgggtgtggctggaacacagcccagaaggtggtgagtgctgagaaacggtcctagagagaaagccggagcctggggatcagggccctcataggccatgccaaggaatctggatacttgcagagctcagttagattgcatacaacgctagctgggtgtggtggcgcacccctgtagtcccagctactcaggaggctgaggcaggagaatcgcttcaactccagaggcagaggttgcagtgagccgagattgcatcactgcactccagcctgggcaacagagtgagactctgtcgcaaaaaaaaaaaaaaaaaaaaaaaaaaaaagattccatacaactccaaatgatggctgtttgactattttttcttcacatcacggatcacccctgccgttatacatccatctgttgattgtctttccccctactagaaaggacaaggactttgtgctgttcactgctgtgtccccaacagccagaagagtgcctggctcacacagacactcaataaatacgtattgaatgcatgactttactggcctgtgtcctctgcttactgagttattgaaagtcagggacctgttggattcatcattgcgtccccagggcctagcacagagcttgatgcacatgctgtttaataaatattgaaagaataaatgaatggaaaaacgtcttccccaatgtgttacacactcccgcagggccgggactatttgatttatgtatctagcgcccaacacattgcctggcagaaagcagaccctcaataaaggtttgttgagctagacaagagtctcttctgcatgcgggcccttgtcaggcctgtcatgggagctcaaataaaggcaaccagaccctatactactggatcaggcagaaagagataccttgttggcaaaggatcttaggaccctggagtcataggctgtgcaggcaggatcagcctgcatgtgtagggtggccagagagaccaaagagggcttcccgggggtcaggaatcctgcctttgtttatgtcccctagcactgcccttctctggcaactggcaggcagccccaccaatgaggtttgggcacagctgggggtggaatgggatgggacagatggtgggagacaaggaaacccccatgttttcctccatctgttacatttaattgacttcccgcagaaagaaaaaaaaataaaccagttgcaaggatgaaattgctaattaaaaggccctctgattagatagacaaatatttaccaattatgcctgaccctgcctgtccccttttacgtctgcgaactcccccatcagcactgtggccacatcatacccagctggtggctcttccaccaatcactctcttggggctcagactggctgcgggtgaaatagggtagaagaaaggtgaatactgcaaacagccgttcaacaaacgcgatgcctgttgcatggtcaggcttagtgctgggcccctggaagccatagcagaatttccatggacagcctttcaagttgtgtgctgcacaaaggtgcacctgcaggagagtgggggctccccctgtcaacctgggacccctggcaccaggcaagggggatttttattttctttgcgcaacgggtcattagcttgccaagctgaatccacaggattttgcctgcccagagggggtacctttttctaattcacacagaatgggctagtggcagctctacagagatgaagatagttcagttcctgatcctcaagggctctagggatagtgggggagaaaaatatgcctatgatgtataaacattcatgtgtgattttttttcttttttcttttcttttttttttgaggacagggtctcactgtgtcacccaggctgagtgcagtggcacgattacgacttgctgcagccttgagacccctctctccccagcagcctcctgaggagctgggattactggtgtgcatcaccatgcctggctaatttttcattttttgtagagacaagatctctctatgttacccaggctggtctcgaactcctggatgcaagcaatcctcctgcctcagcctcccaaagtcctgggattacaagtgtgagctaccatgcctggcttaaacattcattcaataaacatttcttgtttactggccactaatgtttgccaagcactgtactagattctgggagagagagagatgagtaatatatgtttcctgccctccagaagccgggctatttgggggagacagagatacttacctgggtctgcccttcctttttccccttcccttttttaattccaaataatcttcacctgggaggtatgaataaccgctctggactctcaccattcaaatcctggctttaccgtgtcttggctgtgtgaccttgggcaagttatctcacctctctctgcctcaggttgcctctctgtaaactggagataatggtaactgcatcccagggttattataatgattaaataaattagcacatggaattcatgcctgacacggagtgctcagtaaaggttagctattgtgtgactgtttcttttttttttttgagtgcctactgtgtgccaggccctgagtcctggggatacagaactgttaccagttcatttcctctcccttcagagctcacagtgcggaacacacagagaaacccaccaacacacaggcaggctcacacatactcaggccttgctgaaagaaagttgtggtggcagggtgtggttctagaatgaatgagtcttagcttggaagtcagaagatttggggttgtcttaagtccaagatagggaaacggaatgattgcctggtaaggtaacgatctctacatcactggaggtatgtaaaccaaagtgtgaagttgccagagagaggcatcttggctgtgggagaaaagtaggtcaattctggtacgatcgtcccctcctgggacagtgagacaagcttcccaggaccagctggggagccctagagaagcccggcactggcaatgtcctgagagtccattcctggagccaagggacccaggcttcctaccgtgtatgtccatttcctgggcaaggcactggatggcaggactttaagcagaggcaggaaagggcaacttccagcctcttgcagaaggcctgattgcgggggcagtcagttgggattgctcagccctgaagcagagactgagaaccccgcctgcctgtgtgaccaccatccatgtccactccctctctgagcttcagtttctccaccggtaaaatgggaagagaatggaccagagagtatttttctcccattcccaaattacagagtttttttttttttttttaagacaggtcttgctgtatcacccaggctggagtgcagtggtgtgatcatagctcactgcagccttgacctcctggactcaggtgatcctcctgccttagcctccctagtaactgggactataggcacaggccaccatgcctggctaattttgtatttttattttttggtagtaacagagtctccctgtgttgtgcaggctggtctcaaactcctggcctcaagcgatcctcctgcctgccctcaagcgatcctcctgccttgggattacaggtgtgagctgccatgtccagtccacagacaacatgtattgagtgctcactacatgccaagcactgggctaagcctgttgcatgtagcatcttgtttacatttcacaataatcaagggggcaggcatctgcctgctttacagatgaggaaaccaaggccctcagcagtaaagtaaattttccaagttcactcagcatgggaatgatagacacaggtttgtaatccaggtcttgttgacatcgaaacctgggatgctagtaaccctaccctgctgcctgtcagtcctgccaggctttccaggacggcccccaccctgagccacatccccaggaacactctgccactccctatccccctcctgggctcataccatgaaagccccatgcagagcctgctactctagagggatatatattatctaaatttgataagacaactcaatttcactccgtgtctgttaccggcgataaaaccaggagacttttatgacccagcatcctcagcaagattgtcaggaacttattatacaaggtctaactggatttctctctgcagatggctgggagccatgggctggaacgcaattcggcaacacatttggggaaataaatgcaaaatgcttgttccagagacttagataaggcagcaggcctccaagctccccaagaatcggatctgcttttcctgggccctgaagggcgatttggggaggatttacgctgtcggaggaggagggaatggcgggctctttctcccctcatcccttgactcttcttgccccagggaaggaatgtgagcgcacctgagacttggagttcagcaactgtaattccctgagaggtagcaattcagagtagacctgggggtgggaggacaggatggtgggcagtggtgagaccaaggttatgaggactgtgtgcattgaaagaggggtgcaggatgatcaaaacgatggggaactgggtcttcactagctgctcgggatctgccatagagtcactccttactgccctgagaggcccgcgtccttcccaaacacacctctaggactggtgtggcccccataaactgggttcccaaacagaccccattccttggatgtgagttcacatccagattcagatgacccccgtacataagctcacagatactccaagattttgaggttcactgtgagggcgctccaaattcatggcttacctcaaattctgatctctcgcaggcgtgggctcatagacgggcttgcggtccatctcagctttcacagcatccatgcgatttttgccattggaaggaatggcaacaaccacattcacttttgcacccacctaatagatctgccgaatcttgaggttggagctttacaagagccagccccaaattcagggttcattctctagtgcagacatcccccaaacctctgctcacacacagatctggcataaccccagattcagttagctgcccaagctagactccagccctctagctaccagcagcatctgagagttaccccctcaacaagctcataccaagccttgaggatctggcacctccagtcccaggctccggtccttgtgcagggaagctgctgcaacaccactgatctgggaagtttgaggtctgcccttgcgcacctgccctgtgactctaagctctttctacggggccaggaaggcggcggagacatttttatctgtccctgggctccccgatgcttcaatggactccagtaccagaagccctttttttttttgagtcggagtctcgctctgttgcccaggctggagtgcagcggcacaatcttggcccactgcaacctccgcctccccggttgaagcgatacctcctgcctcatcctcctgggaagctgggattacaggtgcacaccaccacacctggctaatttttctatttttagtagagacagggtttcaccatgttggccagctggtcttgaactcctgacctcaggtgatccacccacctcggcctcccaaagtgctgggattacaggcttgagccactacgcctggcatgggagctttgtctcattctttcagccctcccttacctcttcccatgtagagttccatcccaactaggtcctttgcctccagtttttggagggaaagggtaacatttgccaagcatcctctgttgtaccagggcctggcaagtctgtgctttcattgaactcttaccacaacctttcaggctagatttttataatacccactttgcagatgaggaaatggaggcacaaggaggttaagccacttgcccaagagcacacagcccagaagagtgggagctttgtatctgccaggatgctgccccaggtcttggagcagagcttgggaatgcccttgggatttggagttcggtggcgggggtggggggctgttgcctaggtggcacgctggggagggtatgctgttgctgaatctaagcttgtattatttccacactggcaaaacgaattattttcagtagacaggaggatggggtgggggtatgggagtggaggacattgcggtgagaccaagagcactggctgccagggccagtcacttgggggaaagggcaggggctggcctttgccagaagacagagatggatggtctggatcccaggcttaggttacctaagggcagaccaagactcagctcctgcattgggggtggtggtggtggtgtcagaaatcactggagaagccaggagggggggcctaccccaccttgggtgaaggccaggaagtctgtggggcctctggaatactaatggcctccggcgggtcctgcaggatgcagcaggcaggctggagtctatttgtctctccattctcaacactgcagtttcctggagaggggtgatggggaccagggagtgaggacgaggcttggaccagggtcttcggctgaacaagagccaggctgcagtgggaaacacatgcgtgctggaactgggctctaccacttcctagctgtgtgacctcagacaaatcacttcatctctctgggcctcaggtacgtgtaaacaggtacaatgatgctgacctgagggttggtgaggaaggcgcacagtgcgtgctggctcaggagacggcgctctctgttataaagccgttaccatcctgcacgtaacaggcaggtcctgaaaatcacctccaaggggggtagagcccgaaaatcccccaaatcctctggctaagagtgattttattttattttttaaaaagaaataaggaatataatcctcaaaagattttcccttttggctctaaaaaaaaatctaatatcttcatttccatccccccctttataagctaatttgttgaaaattaaaatggggaactcaccaaggctggcattttaattgaatcttgtctggtgtcctctctaggattccctggctggcgtcctccattcaatcctccctgctccatttagcccggttcccaaccttggtggggcctcggcgggaccttggtgggaccttggtggggcctgggactggcccctagggcccaagtgactttccatcacgaaaaaggagcttcagcctggcccctgcctactcctaggggtcatggggtcagaggggcccagggcacaatttctgatctgtgcgaggccccctgctggctgcgcctgtttcctcacctggagatgggattcatctgaatgacttcacctaggacccagtactcctggcacagccagcagatcaatacccagtgttttgtcctcactcacctccaagatctggggggctcccaaagcgggggaaagcagggctgcctcgagctgctcctaggcccccacaggagagcttctcttgcatccatccatccatgggtcatccagccgcaggttagaaagccagttagcggcttcccccactttcagggattttggtaataataataatgcttcttttttttttttgagacggagtctcactctgtcacccaggcgggagtgcagtcacatgatgtcggctcactgcaacctctgcctcccgacttcaagcaattcttgtgcctcagcctcccgagtagctggtattgcaggcgtgtgccaccatgcctggctaatttttgtatttttagtagagatggggtttcatcatgttggcctggctggtctcgagctcccgacctcaagtgatctgcctgccccggcctcccaaagtgctgggattataagcgtgagccaccgcccctggccaaacaatgcttcttgagtacttaagtcctgtcagacatgctacctgcagagtcttattttgtgctcataacaacccaaagaggaaggaactatcgttattattatattattgagacagggtctcactgccacccaggcctggagtgcagtggtgcaactgtagctcactgcagccttgaactcctggggtcaaacaatcctcctgcttcagtatcctgagcagctaggactacaggcccatgccaccaagcctgcctaatttttatttttagagacaggggtctcgctatgttgcccaggctggtctcaaactcctggcctcaagacagcctcctgcctaggcctcccaaagccctaggattacaggtgtgaactgtagtgcttggtctggaaggaactattatgatcttcccattttatgggtgaagaaactgaggctcagagaggattagtaactcccaaggccacggagccagatttaatggcagagcccggattagaagtcaggccatctcaccccagaggccccctcaactcagcctcagtttcctgattttggattaaagtgcgtttgccctggccctgggttcctggcgtgtccctgggccctcgccgtactgccctctgcagcctgccttgtccaggaccggcgggcgggccagggactgaggggaagacaggggctctccgtgcctcatcgccctgtcccccaccccgaggcccagcccagaggcgggcttcctcctctgccccgcggggggccgcaataattgctaatcagccaccgctaattatccggcccatggagaggtgagcgcagcaagggagcgcggaggcggcgcagaacccgggttccagcccaggctcgcgcagcgggacgctggcacgacgctcttcatgctcttcgtttctgggccttggtttccctggctacacgtaggggtgggagaaggcagtaagtagggctctaactctgaaatgcaagggaaagagcctcgctgcctaccccaaagaaagctaaggtggttgaccagcttttgattggaggctgagctcagcctggctgcctgctttaaaacctggatgctggggtaacgaggtggtcaactctcacttttctcatccattaaagtactgatatccacttaaaacggttataagggttcaatatggtatttggaatcgttcctgacgtacagtaagtgctcaataaatgaagcttacggctagggagcattatgcttacgttatctcatttaattctcagaacaacttggggagggaggcattatgacagatggggaaactgaggctcagagaggcgaaaccccttgtttcgtgaaccaagcatccattcatccctgcatccatgctgagcatttgctgagcacttaccatgctccaagctcattgctgacacagacagactacctcccgctgccttggggctcaggctccagcaatttgaatttccacccctctggctctccctgagagggacacctccccactcccttgtagtagctggggaggatataaggggaggcccaccccgtggacacccttggggttcgggtgcctaatgatcccccttcccatcaacaactcatgtaaatttctttcgtaattacactgaaagctatcaaactatctaatttaatttctctgcaaaaataaatagctaaagtggccctaggtactggcataaatccttcaggcagaacagtcttagattgctgcttgtgcaggcctgactggccacaatacacacttaataagcacatatttattgggcccgtgcccccctttggaagaagaggcagggattctgttgactcagccagaaggagaggaaagcgattggggccatggtggtaatgtgaggaggagaggagggagcggagggaaaatatgctgggtaattaattatccgtctttgtacatccataactttttatgcaaaacaaatatgcaaatgctgcctaactggttgccgctgcctaactggttgccttcacctgggtctgcctccaacatgagtgttaatgtgcagttgggcctgtggggaggaggcctgtctgcaaagtgggccagggctgggtcagtgtctcctctctccctcacttgctgtggctcccctggtccactgggccccgcatcattactccaatgtgcttacccaaggccagtgggttatgccttcttaatatcactcttcagcagtcccatctctcttcctggatgctatggctcagcatcagatgacatcctttttttctggcttgtttcttcctctccaacctcatttcctgtccttctccctcttgcctggagtgcccccacccaggctcgctgcacctcaggccctttgcactggctttatctctggaatgctgtgtttgcagggtcagctctttcttttcattcaagtttaaggtcaatgttgccttccccaaccacccagttgaaagtgccccttttggttttttgctaccttgttttgctgttttttttttcaatagtacctattactctgataattttccttttttatgtattagtttttcaaatttctttttctctcccgctggaatgtaacttccgagagaacagccttgtgttatttattgctgtatccccagtgactagaacaatatgcatagttggtccttgcaaaatgtgcattacctgaatgaatgaataaagggaagaagagcttcctcactcccatttttgttccccagtcactctcttctatttatgccattcaagataatcttaaaaacacgaatcctactgtggacaaccttccctgactccttagttctttggaataatatccaagttccttttcctgcccctttatgacctggcctctgttcacctctccagcactctctctatccacctcagttcccttcatcctacacacacattggccttcacacgaagcaccaggcttccagccctgcacaaattgttctggttgccaaattctctttcatacccttctttgcttggtcaactccaccttgtcttttgtgtctcagtcaggcattacctcctccaggaagccctcctgtgtaacctcctttttgcctttctccgttgtgacactttccactttgccttcttacctttctgttaccttttgtagatggagagcttcaggaaggcaggaatggtatctagtttctcatcatttaggcaacaattgcagaactggaatatgaaccagattctgaattaagaagataggttctggagccagcctgcctggattcatatgccaactctgctatttaccggccatagtagctgccctctaagatggttcccgatggggttgtggcatctggtattcttgccttagtgcagaccccctcccctagactttgagctggacctagtgacctgcctctaataatacaacatagcaaaagtaataggatgtcacttctgagattaggttataaaaagattgtggcttctttccatcttgcgcaccctctcttgcttgctgtcttgagggcagccagctgctatgttgtgaactgccccatggagaggcccacgtggcaaggaggtgatatctccagctctacaggcaccggctaaactccacatgggttcctggcctgcagaaactgtgagataacaaatgttttattgttcgtttgtttgtttgtttgttttgagatggagtctcgctcaggtggagtgcagtggtgtgatctctgctcactgcaacctctgcctcccgggtttaagcgattctcctgcctcagcctcctaagcagctgggattacaggcgtgtgccaccacgtacggctaatttttgtatttttagtagagacagcttttcaccctgttggtcagcctggtctcaaactcctgacctcgtgatctgcccacctcgggcttacaaagtgctgggattacaggtgtgagccaccgcgcctggccagcagtggataattaaatactgagtaatcatggggaagttactagatctttctgtgtgtcagtttctgtatctataaaatggggataggctgggcgcggtggctcacgcctgtaatcccagcactttgggaggctgagaaaggcggatcacttgaggtcaggagtttgagaccagcctggtcaacatagtgacccccgtgtctacaaaaaaatataaaaaattagcctggtgtaatagcgcatgcctgtagtcccagtgactcgggaggttgaggcaggagaattgcttgaacctgggaggtagaggttgcagtgagccgagatcatgccactacactccagcctgggcaacagagtgagactctttgtctcaaaaataaaataaaataaaataaataaaatggggataatgattgtacccaccttgtgggcttgttttgagggttgaatcagtgtatgtaaagctcttagcatagtgcctggtatacagtaagtgctgtgtaggtgtagctcttatattctcaggacctaggaggtgcttaataagtgttgagcagaaataaacatgatcagatagtagttactgtttactcctccctcgacatgaaggtcccgcttctccagatggcattcaaggcccattatgactccctgacctcggccagtttcatggctgtggtgctggacactgttcagcccgccatatctcatttcattcttatcatagagctaccctatgaggttggaactgtttcacaaacgtagagacctggcttcagagaggttaagtaacttgctcaaggtcacacagtgagaacaaggttaagctaagatttgaatccaggaatgtctagcttctggttcagcttatttgcacgtcctcagtgcctcccaagggcctggcataagtaggaagtgggtacatggccactgaatgaccaactgcttgccctgggtgaatattagtccccccatctcccgcatttgtcagggaaaaaaacaacaaaaaagctcacccctgccgagagattttggagagcaatgcttaacccagaggaccgacccgccaatgggggcctggggcatatgcccaggggccctgctcagtggcctgctttaatgcagggggaggaagaggcagtgggagccagcagggagagctgcccattagccctaattagcagcccgtttggaaaagagcttgggcagaaattaagatgctgtcagtgggtcccagctgggtcgtagcagattggcagctgcaacatttccagagcctgagcttgaaacacccagctgggaaagcctctctgcctgtttccacctggacccagcggcccctgggagacagccagaccctcttccagccagacagtggtcaccaagacacccccaccccctaccatgcgtgcagagcactcacaaagcccccactccttggttgtctctgtggggcctcctacactcctgcaagatggaacttctatacctgttttgcagaagaagaaacagaggtcatgagagctttactgctgtgcccaagacccacagttaggaaatggcagagtttcgggggaacccttggcccagtgccctaagcccaaggcttggggatgggaagaggaggccccagaaggatcctgactagggctgggataggcggttagcaggaggacaggggaaagtgcctaggccccaagtcaccatcattgactccatccccttaccccaacccaggggagggaagagtgccaccagtgccacctcttctgcgggaagaaacaagttatgccatagaggtgggccgggtggagggggaaatagaagtggaagaacaggaaaaccaaacgtcaggaaggacccagcctgcctcccaaatcttcacttcctctcttaaagtgctaagaataaactaggatttaaaatcaagctaaaaataaaaaaaaatcacaaaaccctaaagctgccttccaagaaaccaaaggcagtgattcgggcagcagacatgctgtgggaaagccttgctggacggcaggcagggctgtgcagtgggaggtgggccaagggggccagggtccaagggggcccgcttcgggctgtcagtgttgttattcataataacaacaggtcaggtgtcctgggtttatgacacaccagctacttgctgggtgctttgtagagattaactctttaatccttgcaattaacctcctaggggtgggtccatatcagttcttgtttcatagttgaagaaataggtgcagggggtgaaagggcctgtgcacgtggaggagagagatttccactacaaatctgtccatctccagaaggttgtgtgtgtctcagctacaccagactgagatggggggatgctgccagctatgagggagtccatcatttttacctcaaagtatgacttagatcttttactttgaataagttttgaaagcagagcagagagagaacaggcagatattgactgcctgggaggcagcgaggaagaatcacttcctggaggggagactggggtctcataggagaccaacgcctgactcatcacagatctggttttggtggaaatttaccccaaccttgggccatctttcatccccctagaccttgaccaggggttgacattgacaaagtcccacctatgggctgcaccttgcctattttgccaataaagttttattggaacacagcacatccacatccacttttacttcttgtctgtggctgctttcatgctatggtgacagatgcatagttaccagagactgtgtggctctcaaagctggaaaatactcactctcttgccctttgcagaaaaagtttgctgatccagatcctagatgacataatcatccctttaagatttcagaatcctagaacatcagagccaaagcattcacacagaatatactgtccagctggggcacagggaggggaagggacttgcccaaggacacacagcaaatagtgaaagaaccaagcagagagtcttcagctcttgcattggactgatgcagtggccaggcgggcgaccttgaggaaaccctgacagcatcaatgctagtgctgacaagtgtgtggtttgcacgtccctgacaatccctacatggcattaaataacactgaactgtcacctagtgagaaatgtggttcctcctcagtcctctttcagtctttcgattatgtcaaagggaaagttgggtttggggatcgcatgtctttatcacttctctaatactcagtaatcttcctctgtaataaagagagtatagacccagactgaagccttctgcaggcaatgttatcagacccggcatcagtagccctgtttagtgtgcttatttttacatcaccgtctatgttctgtgttactgtttttccacttaatgtactgatggaagttttgctttcaaaataaaactaagcttaaaaaggaggttgttgggggaagaaaaacattaagtaaataatagttcaggttgtacttggatagagcagaaatcatgaatatggtatttgaatggctgagacagggaaaacaccgatcgattccataatgtttccagaactgcagttccaaggttccgtgatttaagagcagaacttggtctcagagcaagggtagggctgccaacccggtggtgcaggctgcccactgcacaaagcctccaggccctcatctggatgacgagtgacttctaattcacatgaagatgtgctatgggctagcaggctctccagccaggtgccctcatctctgccttctgacttgaggtacagatcccatgggatggggacatcttggaggcagccaggtgattggcagaggtcagagaatagaggtcactgagataggggtgctccctgttgccatctggtcaccctgcctgcagtgaggctgctcctatcccaagctgctgcatgacaatgctgaccttggtggcatgggctgtgaacagccttccataggaccaggccctgcagacagatcaacctggattagagggctgcctctgccacatgctcactgtgtgaccttaggcagcttgtctcccacctctctgagcctcagtttccacaactgtgcaacagagctccttagtgattggacctgacccccagggttgtcctgaggatgtgcattcagtggcacagggaatgagtgacacacggtgagggctgaataaacggcaggtaggctgagcattccccatcctgagagggaccctctggaagtgtcacggggtggtcagctctcccagaggtcacggctgggtctgcatgaagctggtggctgcagagaggccaggctgactcccgcagccactgccaggctgagttgatggcaactggctctccagctgccaggcagctcttgacatttttataggcagatcacaggtaatgagctttccctccagaacctagggacattctggaaaattgtgttcggattgaagtgggatgcgagtggggagagcaggtccaggaggtgagagactctccttgcctctgcctgcctccattcctaccctcatccccactgcaaaggggagaatcgaccaaaaccatctagccacatgggggcccagacccctagggatggtgcgggaggcagatttctcttcccttttggcattcctttgtgctgagctctgtggtctcagaggcagattccctggcattacagaggggcagtgactgtgctccaaaggcctcctttcttccttccatgtgtgcatcctgcatcacgtgtgcatccaccattcccccacccgccctcccacacatcaacagatgtttatggagccctctccttggctatgcattgcactgtgtaaggccctgaggacagggtggtagacaggaccaagaagaggtgtccatccttcccaagaacattcactcactcattcatttactcaacagatgtttactgtgcttctgttatgtgccagccaccatggctagtggctatacaatgatgatcaagaaatataaggttcctctactcaggggcatcaggaggatgcccctccagccttcaggatgggcactgatgggtactcctgagaataaaggtgatggagccctaaggctggtgatgagtgcttacggtgcccccaaagtcatcactgatgactttcatcagtgatggtatcctttcagcaatattggtatcctttcagcaatattggtatcctttcaacgatgatagtatcctttcatcaatgatagcatcctttcatcgatgatggtatccttgacgtattagtgttaagtattgatatgcttcaagcacatcagttacagacactgtcactcctagggcatcaaggatgggtgctagtgggtagaaaccttttgcttctgtgggagatcttggttcatcctccacatttggcctttcttcttccactcaaagctcttgcaggcagacagacctatggtggactctgtggcccaagacattatatgatggtggccgtcccacagcctcccccactgaaagggctggcttcccactggaggccaatttattcttttgcctgggcttctctctgcagctagaatgtcattttccacaaaaccctctttcttgtaattactgagaattactcatgaagagagagaggagagagagagtgtgtgtgggtattgattgccaccctgagaagctcaggaatcatttagagtagattaacctaactttcttttgccttttgggaagttggactctgacttatttgaggagattaatcagctcataagaaatctggacagccttcctacctcttctatctctttttggattagctggggccatgtcattttcaccatgccttcgaaatatccttttcctcactctctagcactccgtctacattttcactattattgcccagtccatttagttcagcaggattctctgtagctcctcttttggggaatgggtggaggcgtccctggctgccattagattaccctgatagccttgttgcctggatcttgggtgggcacaacttcagggagggctgggccactacaggcaagtctcctgcatccaagcccggggtctctgcagctgtcacgtaggaagagtccaaccattccattctaaaatgcagtattttccagagtcttttctgcgaggtttgcacattgattctgcagatgctaatcctatccatccagtcttccggacttccaggtgctgctcatccatcccctcctcttcccttgcaggaagctatcccagactaagcactagtcctgcttactgaggcagagaggatgggaaatgagaggagagaaaggaagcctgagaggggaaagggagaagagaaaaggtggtgagtggccccggggaaggagtcagcatttgcctgactctgcgacacattttgtggagtgcaaaaagggcaggttccggagccagacagacttggggttaaatctcagctctactccttcctagcttggtgaccttgggcaagtcactttacctctctgagatttcattgttcacatgggatgataacagttcctagctcacattaccattgccaaatgagatcttgtatgtgacatgctgaaagcaaggcctggcgcttagtgggtgtgccattgacagcaggtggatatcgccaggccccaaacatgggggactcccaatgaatcttctgtaaagacttgatgtatgatacggaacttcatccttgggagcctctactcctcttcctcatccccctgtctccaggtagctgcagaaggagcagccaggatacccgggtctttggcaggtgaggcccagattctcagctcctgggaagctgagaatattgcaggtccttgctgctgcttctctcctcttccaggaaaaagtttgaagtcaaatgggtcccgaggtggaatattttccaaatgtcagtgcagtctgtggtacattacagctaaatgtgatcatctcagtgctgggctctgaatgtcagcgcactggccgtgatggagtgacaaatagcaggttgacaggtggggctgtggccccccccccttcccctgggaaatcagcctggggaactgggccatctctgggttcagcaggtgaggaccatgggcctctgtggggacacggagtgggctttgaggggtcctgtgcgtgtgatgtgtgcatgcatgtgtgcacatgtggcaatgtctctgtgcctgtacacttcctcttcggtgtgcacaaaggctcagacaccctgggagggagttcactaagcacagctggagatctgtgtgtggctgttgtatgtgtgttcttcatctccatctccatcatgttctccgtgagtctacactcattagtagaactgcttgcatggtgtacacacattttcactaactgaccgtgagactgcgtgtacctgtatagatagacaccatctatctcttgcagtcttttctatggcgtacatgtgtgtacatgatcttcctgtgcccatatgtgtagttgtgtgtgtggacaattgtgtatggttctgtgaatagtatttgattgtatgtgtgtgtgtgtgtgtgtgtgtgtgtggttgtctaggtttataaattccatctcaacagcaaaggtggaaggggaaactggagttgggagaaggctctctgcctcattgcccttgtggtggggcattttgatggttgcctgctctgtggggcctgtgattggctgggtgggatggggattaaattgcctccaattaccagagagtaagcagtgagctgtgaggccagggggatggtgcatggatgccaggatctgacaaccacaacgggattaagaagccctgtgtatgcaagcggcctcatgtatctgtgtgaggctgcgtgctcgtgaatgcctgtgactgtgtgttttgcatctttgtgggcgggtgtatttgcccatgagaatgcaaacaagcatgtctgtgttgtgtgtgtgattatgagaacgcagatgtgtccctgtgcatccttctatgtggctgtcattgtgcctgcgtgggtgtgctagcatgcatctgtgtgtctgggaatgtgtgtgagttgtggtctgcgtcaatgcatatctccatgtctgtgagcatgtgtgtctatgtatatgactctgcatgtgtctttgtgtgtgagggttctgctttgagtgtgtgtgtccttgtgtgagacttcacatatatacgtgggtctctggttttctctgagtagtgtgtgtgtgtgtgtgtgtgtgtgtgtgtggttaaatgtgagggtctcagtgaatcagtggttaggagggaagaggtagggagaaaactgttctccatcccatccccatcccagctggtgatcagaattccaaggcctcctccctctgaccacacctgagtacaagcttccacaaaaaatgggaagactccccattagggagcctgatgaggggtctgtgagctggtgctgagcctggaatggggaatgccatgggttgagttgtgtccccctaaaattcatatgttgaattcctgaagtagttgtacatgagaacgtgaccttgtttggaaataggatcgttgcagatgtacatggctaagatgaggttatcctagggtcggataggctgctaatccaatatgacttgtgtccttataaaagggaaaatttgggccaggcacggtggctcacgcctgtaatcccagcactttgggaggccgaggcaggtggatcacctgaggtcaggagtttgagacaagcctagccaatagcgaaaccctgtctctactaaaaacacaaaaattagccaggcgtggtggcaggtacttgtaatcccagctactcgggaggctgaggcagcaggatcgcttgaacctgggaggcggaggttgcagtgagccgaggtcgcgccagtgcactccagcctgggcaacaagagtgaaactccatctcaataaataaataaataaataaataaataaataaaaataaataaaaaggagaaatttggacccagacacagatgtgttgagggaagacgatgttaagagacacagagagaagatggccatttgtaagcctaggagagaggcctggaacagattctttctcaccgccctgctggcacctggatatcagacttccaagcctccaggcctgggagatcatttggtgctgttgtttaagccactcagttgatggtgctttattacagcagccctaggacatgaatccaggggatgtgaagtgctcaagggcttctcctcccactgcccttctgctccctatggacccatttcacagatgtgtgtgttgtgatcagcggtggcctcctcttcgctccgtctgctctgaagcactcctccctagaggcctcagtttagtagcctcctttgggagacctttcagataaccccacccctgtccctctcccagcccttccctgtccccggatctcaccttccttcaagctgtcctggcaaggccaggctttatcaccttctcaaaagtaagtacattttctccccatttttctcttctctctgcatagctctgtgtccttgcatacaggaggtgcccactaaaggtctcagtgaggattcccaggtttccaacctcttcctgggcttgggatgggaaagaggatttgtcctcacccctccttccccctacaccatgccacctcttccatgtcctaacagctgctgtttattttgttcttactgtatgccagggctaagctaggtgctttagtgggggaccacttcctcctctgaacaactctatggggtagctgctattttggcttcattttccaaaggggaaatggaatcacagggaggataaataaatggtctaagatcacaccttaaaattcacaaatgccagatcaggaaggagctttaggaatctgttaggttacccctctcagctgcccctatttcacagctggagaaacggaggtccaagtggctcttctccctccacctgcctctggtgctccacagggctcacccctgactgtcggatcccatcgttttacacactgtccctgtgcctcctactcttgcagcttcagctttcctgaagacaccagtgagtagaaagaccactttagtctccgctcctcctcctgagctccagccctgcatttccacatcttgtgcatgtggcctgcaggcccctcaaactcagcatgtctaaaatcaaactgatctctcctgacctcagaaccaaggcttctcctggattctctggctcattaccagctttgccgcccttgtcactcaaaggctgaagcctttgacctcctctacccaccatccccacacgcggtcaattgccaactcctgctggctctttcttctaaactatttctcagatccactgacccagtttaagcctcaatgtctctctctgagggtcctgtgtcagcctttcatatcagctagaatgaggtttggctgcttgagacaaaagaccaaagtgacagagactttgacaagttggaagtttatttgtctcttatgtgagccaagtctggagatgggagaggttcagggctggtatggtagctctatgaggttgataagaaccaagtccatccatagggtatgacctttgtcctcatggctcaaggtggctgcttgagctccagccatctcagctgtgttcagccagcagaaagaagaaagggacagtaaaaaagaggcaaagggcatgagtcagcagccttttaaagaggtgtcccagaagctgctacatgacaattcttctaaggttgtattggctgggactcagttcatgcacagttcatacacagctgtgaaggaagctggaaaatgtggcccttgtaatagaaggccatgtgcttggttaaaatttggggcttctctgattaaggaagaaagtgagactgtgacctcctcccttcctcactggtctccctctcatttctttcatcctctaatccagcttgggcaagtagccaggataatctttctaaaatgcaaatctatacatagggttgccagatttagcaaataaaaatacaaaattcccagttaaatgtaaattccagataagtaatatataagtaattttgcataagtatgtcctgtgcaatacttagaatactaatactagaaaaattattttttatttatctgaaatttgcatttaactgggcaccctgcaatttatctgtccagcctatccatatacttttcatggttccccactgttgtcagaaaaagacccgagctctctggaaggctttgctgggccctttgcaatctgtcccccaactgacctgtctaggtccttgttccctgaacaagccctgcactgcttccgctgtctccaagccccccgaacctttgcttaagctcttttcctgggagactgtccttctctatctgagaaggcccatgcacccagagggaacatggcccctgtggctctagattcctggggacatggcagggacgagtgattatttgctgaatgaatgaaatgatgggtccagggacacgcgcaaatgagaggcaaggttggagtggctccctcacattatgactccctgtacagtgctctctgcacccaggttggctcatgtgggcccagcactgggatctctgtccctggggccttcattttccacaatcccacgtctgggcatggcacccccccagcacacaaggggttaagccagccttggagttgggagctggagcccatggagtccttcctgacaataaagctaatgaatccctccttgctgttttctcttgcacaataacatttaatcatcatttgcacagcagatgagaagtttgcagcagatgcaattctgcgtgactggcgatttctgcgtgtgggcatcattcttgctgtccccagcacacctgactatctggggttgggcaggctgtgccccagagagggtgtgtgtgcatccacatgatagggatctgactccacacacgtgtgggagatgggctttggaggcacgtgtctatgtgcgtgcttgtctgtggggttgagttaggcacatggggcatgggtatgagtgaactgtgctgggcctgcctaaaggtgcacgtggacagaggtggttaatgcctgaggacacgttgtctggaagttgaggaacctacatggagacaggcagatgcacatataccattgcatgtgtgtgagtgcttggtgcagatctgagcatttgttggaggatggctgtttgtttaggtgcttgtacttgatcgtgtatattatgttcatacacacagacctatgtcctcacatgtacaaatgcatctatgggagcatgcgtttgaatttggagtttgtaatggactgttcctgaggttacatttgctttcctgtgcgtgcatacaaatgggcatatgactgagaatgagagcatggggttgtatgttcatgcacagaagtacatttgagggtatgcacacatatgtgctatgtatttgagtgggagtttctggggacacacatatgttagtgaatgggtatgaatatatgcctgaatgggaaaatatgtttgcttattgaagagtaccagtggacacacatgtacatgcatgtaagagaacttatctatggcaggcatgtgcatgctctgaatacaaacatgagtgcacacatgagagcttgcctcccatgcacgcatagcatgctggcatgtgtccacatttgcagacctgcagggatatgctctgtgtgtatcgctgtgaacatgtctgcattgtgcccacaggtgcgaacatgtctgtgggtacaacctgtgcatgcatcatgtgctggcatgctcatgcacacgctggaacgtgagccgtctcgcctcagagtgagggctgacagggttgcattttccaaaagctcagcgaccagtgacagagctggcctgggagtgcttgctggcaggaggtgagtggagctgctgatttgtgacctgggggtgggctgtgatgacggctggctgatggatgcaggcgcttagacaccctgtatgacagcagccagctctctgagctgcctgaatcaggaggtgggagtttagttcttgacctgtgctgctcaatgctggcttcccacctccctggtgcttgtccacagccacatgaggacacacacacacacaccagagacacagacccaggcttggacagtggctagccagctaggcccctctgtccatcttgctcccagctctgccatcccctgaagtgcctccccttctcaccaacatgcttctctgttctcccagaaacttcactcacaatcagagtcatctaggccctgtgcagagccgtggcgtgtgggagtgtgaaatcatttcaggcctttaaaggcttcatgcccttgggcaaagcatggttcatctgtgagccctgggttcctcatctcatcctcataaaacaggcctaatgaaagcacctgcttaaaattaaacaaggcaaattatgtaaaagcactaaacacagtaaacacagcgtccattctccatgagatttacctatcttagtattaattatgtatggtgctgagaacagggcctggcatgctgcaatgctatataagtgtgctgtcaccgtcatcactactatcatcgtcgttgttattaatatccctggttctgaaatccttggccaattgcacatcaattcttgctcaagaccctgaatactcttttatcccatgataatgatgatgatgatgacaacaaaaggggaatatttttcttttcatcttcctagatgccttgtaagaaggtcaggaatagtaaatgggaggctctttattttctaagctccttgatagagctgggtttgctcatttggagcttggagctggcatggttgtattttctgcctaacacagcatgtggaactcttggggaacctggtgggaatcaatgagacagatgaccaaaggctgtgcgtcccataaaaccctgctctgtgaccccaagtcatcagaaaaactcacaaatgcttggcatgagtagacaccttgtgcaacccagtgaaagggcaggactcactggatttcactctgggatggctcagcacccagtggagacagcaagtgtggatgcaggagctggaagcaaaggggatcgagggatcattaccttttcctccacaccccactctggaactagcagaaatcacggggcgcttgaggacttctacaggctgtggaatgcagtggcgggtagaggaatgagctctcccagagcacagacagggacttttggatacacccaagcatatgtttggggcttcctgtgtgctggacactgtatgtactgctgacggggtaggttctgggggtcagagcacccgggtttaaatctcagcatctccagttatttgtcatttgatcttgcacaagttacttaacctccttgtgcctcagttttctcacctgtaaaacgagggctgcctcattgcgttgttgtgggattaaatgcgttaatttatgtaaaatgctcagtaagtgtcagctgttgctattgcgttttatccttattgcaaccctatgaagtaggtggtctgagcatatgcactttatggataagaaaactgaggcacacagagggtaaataacttgtctgaagtcacacaatggccgggcgtggtgcctcatgcttgtaatcccagcactttgggaggccaaagcgggaggatcacttgagcccaggagtttgagaccagcctcggcagcatagcaagacgccatctctacaaaaaattagctaggtgtgatggtgcatgtctgcagtcccaactacctggggggctgaggtgagaggattggttgagcctggtatattgaggctgcagtgagccatgattgtgccattgcactccagctgggcgacagagcaagaccctggaaagagagaaagaaagaaagaaaaagaaagaaagaaagaaaaggaaagaaagaaagaaagaaggaaggaaggaaagaaagaagagagagagggagggagagaaagaaagagaaagaaagagaaagaaagaaggaaagaaaggaaggaaggagaaagaaaaagaaagagaaagagagagaaagaaagagagaaagaaaaataaagaaagaaagaaaaaagagaaatcatatggtgggtaaatcgtagagccaaaggctcagaaggcaaatctggataaataatgttctttatttctggcaagatctttgactctgtgtgaccttgggtaagtaattctccatgtgtgaggtttagacaggatgttcaagggacctatgacttcatgtccgtgtgtccctctggacatataatctgcctgtgacctccttcttggcagggtcagtatctgctaaggcaaccagtgcatgtggaagggacaggcttggagtcgggggaacctgtgccgcctttgctctgtcccatactagctgggagaccttgaaccagccactttattcccctgagtttcagtttcccctttctacaatggagctggcaaccaacctcagaaatgctgttgggcttctgtatgtgagagctgggcacacggggctgagagaggtggctgcacatctccccacgggtctccaagttaccatgcccatttgtagcatgagctataggaaccatgggttaaaggtcccacataggatgatttgggggttcccaaatatccctccacttgggcttaccatgctaaccccacatccctgccactggccactctcaatggactttagaaggcatattcaagttgagcaagttatcaagctccttaacctggccttcaagttcttttcacaactacctccaaccagccttccctgcctcacctcccaccactcctccaccctgcgatccagcccccagggccaaaaacccttcccgaagctgccacacacttcttaccttctccccacccccagcctttgcagatgctcttctctctgcttggaatactcttgctcgcatggccacctcacatcccatactcattcttcgagacccagttgaagttacttcctctgggaagccctccaggattactcagtctttctttagtgcttccaggatcttattctgttaattctgctacaattcttaccaaacacattatttttggctgcttcagctccctgatccacttccttcctccaacttacgtcttgggctaccggaagggaggaattacctatcatctatgtaacccttggcagtttactactctcttagcctcagtttcctcatctgtgaactggggctgacagtacctaaatgagaaaaaataatgcaggtaaggcactgggacatactagccatctctggatctatcacagtggaccttggcaaatgtggagggaatgaatgagagctccctgggagggtaagaaaaataaggctaataagcatttattgggaactttccacatgtcaggaaggcactgagttcagagcttaacatccactatctcctttaagacttttaataatcctttaaggaagagactatcattatccccattttacagataaggcaactgaggcttcagcagtggaggaccttgatgaaggatgcccagctagcaggagctggaattcatgttggatcaatgtggaatgaatgaatcacttgggcgtggggggaggtgggaggacaaataaccgtatcttataatcatatggttttagagctggaaactcttcaggtgacttagtccaggggttcttaatttgggatccatgagtgggaagactgatgggttccaaagccagacagataaggtccccccatcttgcccagtggtttctgacccctctgtctcctgccaatccttgcatccactcaagtcctggagtcacccagcttgttcttgcttggctccgctggtatttcagtgtggtctgagactcctgaaggctccgcagttgccgggagtgtccttatcccccatgcagggcaggatcaggagccgacaactgcaaccttttcccctcccctgggagatgtagggaaaaggggaagggcatctggagcaagggagagagctcagaccttggaggcagacacactgggcttctaagaaccacaaagataagaatagtaacaaaggctagcatttattgaacacctactatgtgccaggcactgtcctaaccacttgacacatatgaaccctttttagcctcacaactcttcgaggtaggttctgttattaaccccatttgacagatgaggaaactgaggaccagagaagtgaagtgacttgcccgaggccaggcagctggtcagtgccagaggctctgccattcactggccaggtgcccttggacgggtcacagccacttctctggggtcctttccccttctattccgtgcaggacaccacctcatggtttctctgacgactgagctggtctctgtacagcgtcccagcacacagtaggtgcttagtaagtgaacagccttctttcctcttaactctgatgggggaaacctggggtgggggcatctcagcggcgtgctccctccagcattctcccccaggccaggattgagtgacccgccccttcccgactctgcaacgccacccccatctcccattctaaccccagagccacaccgtgcccggtctcgcctcagttttaatgccgttggtcagaatcccgcacctctgggctccaaagctgcacccctagaggaggaggaatggaagagtccgctcctagcaagtcccccctccgtccagccgccaagggagggttgggggagggcaggaaagggggtccgcgggggaaacgcgttgtcctggggccccggcgtgtgctgggcgggtgagcagccgcgccccgacggcagggcgaggggctaggaggcctgggcctcgtcgtccccgcggtggccggcgtagagcgcggccaggggccggaagcgcggaccccagctgctgagataggcgaagtcctgctcggagcccgacgagccgctgtgcagggagctgagcgaggcggccggcgagtccgcgccctcgaaggcgtaggtctggaaggcgtcgtagggcggcaccgacaggtccccgtccgccagtgccaccttgcggctgatgaagtccctgaacactgagaagtctggctcggggctcggcggcccctgcggcagcgagtggcgctcggagggcaggtgggcctgcggggggctgcccgcgcccccgcccgagcccccgcccgctcccccgcccgcgctgccgcccccgtcgccgcccttgagctcgccgaagtcgtagaggctccgcagcgccgacatgtcgtaggcttcggtgtcctgctcgccgccgccttcgtcgttgtatttgatgacgttgtcccgcatgtcttcatcctcgtccgagctcaggtggctcttgtggtggcgcctgagggtgaggatcagcagcaccagcactgcgagggggacagagggggcaactgagggccaagcccctcccagggcattagaaggaccctctaccccatctcctcccgcctcccacccagcagagcgggcccagcctcaacattcctacagatttcctggatttctgttcaaaaagccattcttgcaatcagaactgagctgagtgtctggagaggtagtgagctacccatctcgggaggtatgcaaatcgaggctagattactctggggtggaggtggccaatgggagagcagtgttaaaggttttcctgggtgttgaggcctgaggtctcccttctcagccctatgaagagatacactctctgaggactctaggtgctgggggtctgtagcaggcagctgagaaacagaaggagctggaggagtgaaagatgtccttcaccctgacctctctttcaccctcaccctcctctgccacaccagaagtcttgagctcctactcaatcctttggttctcaggtcaaggcctgcaggaacccttccctgagagctgcaggccaggttccatgccttcccctgcaagattccccaggacggggctccttcctctatcatactggttctcaaagtgcggcccctgggcaacagcaacatcctcctgggagcttgttagaaatgcagacccttggatcctggcacggatcttgtggcagtggaggggaatctgtgttttaacaagacctgcagacctgaagaggcagctcaagtttgaaagccacagctctgtcatagaccagaccctgctgtgttaccaggtctgtctccaccccaaaacacacaccctaagctaggacctgggaaatgttcctctatcttggtgcctggcatgcagtaagcacttgaagcatgcttgttgaatgaatgaatgactaaaggaagagttggatggagacttgggtaagtgaatgaatgcttgtcccctcttggctttcttcacttgatttccaggactccacattctcctcctcctcccacctcactgatcactcattctcaatcttctaagcaggtttctcctcgcctctcttaactcagatgtcctaggattcagacctcggttctgtgtccatgctccctctcttggagctctcctttggtctcaacagctttaaaagttccatttagaaactgacaatccccatatctcagcctccagcctggacctctcccctgaaatctagattgtacattcaatttcctactcaacacgccctcttgttgaccaagcgaatctcaaacttaacaggttcaaaggtgaaatactaatctttcccccttccccaccccgagtctcccccacctcagtgttaggaaccccgacttttcaattactcagggcttctaagtctcttttgttgagtgctaaatctcagtgtctagtacatgggaggaactcactggatggatgtataggtaaatgatgatgggtggatggactgacagatggacagacatgtacgaggtactgtgctgggcactggactcttcttgctcctccaaacagctccagtggccagagctggctgtgagggccatggggcagggcacctgctcaccacctaacaaggtggcttgtgacagggaagagcacgagagctggggacaggcccggagggagggcacagggaaggaaggtgtcaggagagaagtgggaaagatggatggatggcttctggagccgaggctgggagctctggagggggatgcccgcgggagcagatggtgaggtttgcgggtggcgggcgacagatgtgccaggcctgatcagcgattccacccgtcacctttagagcactgatgtgcactttcttcgtttgtgggcaattaggcagaactttgtttgcactgcctcggaaaatgaaaccgctgtaaagtgcaccctctggaaaaagggtttctgagccatgggctagggtggggggagaagggggacctcccaactatgaggagcctgcccagggcctctgctgggacctgaggaggtacagcctggccataggcaggtcctcagagggtggacagaggccgtgccagtgccagccagtgagggcggggggaggcagctgacatctcccagggagcagagcaaggctggaatctgcacttggacctcccttgagctcctctagctttggcctcagtgcccttctttacttgggtggttacagctgtaacaggtggcatatggccattcaaatccaggttagcttctgaaacttgacctcttcattggggagactttggggtgcaaatggctgctagtggcctggtaccagtgtagattttgcccccctcccccaccaccaatgacttgagattttgctctcagtttagattcatagcaggtggtgtagttagaggagcagaggacacagggtgagaagacctaatatcaaatccaaagattatccagtacccttacaccagccacctaacctctctgacccccagcgctttcatctgaaaaatgggatgatatgcctggccatgtgcttgtgaggttcacaagagccctttttactaaaagtcctacatagagactaaaaaaggaccattcacatgagaaaattttttaaaaatatgctagggtgaggtttgggctacacgtgaatggggtgggccacagtgagctcatccctggagttggtggcggggccgctctgcacttagaagactcctcatgggggctgcttgttagagcttggagatggtttggccagcccatcctcatgtggagagggaagctgaggccccatgggggctggttaggaaggaaacccaggacgccaggatggggccaatcaggcagggctgggtggctctcgatggactcaccaaccaggatgagaacgcagaccaagagggcgatgagggcgccggggctgagggaggcggccatgacaaaggccgtggtgttgcaggactggatggtgccggagctgtcgcagccacagatgcggatggtgagcgtgcctgtgctgctcagtgtgggcggcccactgtctaccaccaggatgggcaggaagaacacgtcctgctcctgccggttgaagcccacgtgctgcgtgtgcactgcagcggtgttgtctgttccggaagaagggggagcggtgtgacttggggccgggggtcagcatccttgtcctagccacctcctgattgcatcgtgagatttgcctccctatgccccaaactacagcctcccaatggactcatgggtctcttctctgatctcccaaaattctattaccagatgcctccaaattctgccccatgctgcccaaagattctgtcccccaaagtctaccctcagctgcccaaaatcctgtccccatgtagcccacaattctgtcctcaaaccatcccaagattctgttttcagctattctaagattttgtcctcagctgtgccaaggtccccagctattcccagattccgtccccagctaggccaaggtcctgtccctggcgttgtctttttttttttttttttttttgccatttgtctcaacagcttgtttttgctctagattccaccccagcttcccagcgtattctgaccctaggaatcctatagggtccttgggttgtggtttgttgggccctgacaagtcctgggtcctcagaagggactgggaactctggctggcatctgcctttggctgtgggatctttctgtccttcataccccaaggccagttgagagtcctggagcctgacaaggagtctctgcctaagaggctgagcctagagggctgggggcgtggtgaggggcctgatgaggggccctggagcattgaggccttctccacatctttccttttcacataggcggccagagaggacagtgaacaaacacaaatggaactcatggcactggttcagcctgtcaccggggaagccaggcaggacgcagggggatggtggctggccttggagcacaggctgaggtgacaggtggcacccccttctccgccctttctgcctccttcacacctgttctgtaggagtcaggccacctgaccctctgtcattttgatggcctctctcagttctgcacatgcaggggtacgaagtgcccagagctccgaaggctgctgcccctcccttcacagccaactctgccaaagggggccctgcattcctgctgggggccttcagtcctccttctccccgcggtcttcagtctgctgtttctaatctgagagccagatctgggagatctgttggcagcctgggttccttaccctgcttcgtggccccagttaacccagctccttccccagacgaccccaattcagtgtcccagatctggcctttctcatcatggatgctatgcaggaaaaggagccctacgaaggtctgacttgtggcctttggcacatctcagaagtggactgcaggtccagatgcagcacgactggctgtgagttggaggctgcccacgaggtgccgggaacatgagggttcattccattagcctatctccttttacacacatttgagaatttccattaaaatgttgaaaaataatgcaagtctatcatttactagctggggaaacccactgagcttctctaagcttcagtttacccatctgtaaactcagaaagggtatcatgcaggtgtgaggattaaatggtgtaattcacacataacccttagaaaagttcccagcccatagaaatgctcaataatgctgattaatattttttcagaccccgcccccatcttccctgtgctgcacccgctgccggctccctgtctaggccgccctgcctttcctcataaagttcctgctctctggaacaccctcttcaccttcttgcctgggcaaattcctcatccgtcatgctccagctaaatgtcacctcctttcttgtggcctcctttctccgcttccctgggaaggaaggatttatggctccccgctccctgctctgactacgcaggtgccatgcacagttctgttacagcacttgtcacgttgtgttaagttagtgtgtgcctgtttctccactgcatggccagccagggctggcatggagccagtcttgaagagcaatccttgaatgaaccacagcttttgggagaactggtggtcttgggtcagcccctcaggtcactgctgccaccctgtccccggagcttacatggggtggtcacactggatggcagctctggtggccacctcagccaaacagaagcaattaaggcagaatctcaggccccttgggttggaaagccttgtgaacttggcaaggttgagtcaagttcgacagttcaaactggctacattcaggcttgaactctagctctccccccaaaggatgcgtcaaccccagctgggaaaaatctgccttctgcaggggaagaaagggggctggagggcaagatgggagaaagagggaatggcatgggacccatttgtactgaatggattttttttatgcatcaaggactctctgcatattttaaatacatagtaatgtttaatcctcataacctgttaagagttgtggcattattcccattttgtatatatggaaattgtggctcagagacaagtgacttgtctgaatttttccagtgaaagcattcttccttccttccaaccatccaacaaatctttttttttcttgagacaaggtctcactctgtcacccaggctggagtgcagtggtgtgacctcagctcactgtgacctcggtctcccaggctcaagcaatcctcccaccttagcttcctgagtacctaggactacaggtatgcaccaccatgctcagctaattttttttaatttttaaagtttgttttgtgtgtgtgtgtgtgtgtgtgtgtgtgtgtgtgtgtgtacagatgaggtctcattgtattgtctaggctggtctcgaactcctggggctcctcctgcctcagcctcccaaagtggtggcattacaggcataagccaccatgactggcctccatccaacaaatctttattaactactatgtgctaggcaccatgctagtcgccatgagaaaacaatagagagctacaccagctcgctgctggtcctggatcagagctcatattttcatgtaagaaacaatgctaatcaaataaacccacaatttagtctacaattacaaaccatggtgagtgctgtgaaggaagaatataggaagagcacataacagagcacctgagccagtctaggaggtcggggagagcttcttggaagaagtgatatgattcctgagcctgaacagtgagtttagggagagggaacagcgtatgcaaaggtcctgaggttggaagaagcataacacactcagggacccgggacactcagaggacactcagtcctttgtggctggaggaatgagggtaatagctacaatgagtcaagacgaggctggaggaggaggcaggcggtcattgtggaaagcctgggaggctgtggtaaggaatttgggtcattttcccttccttcccttccttcccttccttccttccctccctccctccctcccttccttccttcttcctccctccctcctttctctcttttctttttcctttcctttccctctttcttttcttttcttttctttctttttttccttccttccttccttccttccttccttccttccttctttctttctttctttctttctttctttctttctttcttttctctctctttctctttcctttctttcttcctttcttcctttcacagaatcttgctctgtcacccaaattggagtgcagtggtgcaatcttggctcactacaacctccgtctcctgggttcaagcaattctcctgcctcagcctcctaaggagctgggattacaggcgtctgccaccacgcctggctaatttttgtactttttagtagagacggggtttcatgatgttggccaggctggtctcaaactcctggcctcaactgatgtgcctgcctcagcctcccaaagtgccatgattacaggcatgagccaccactactggccagaatttggataattttcttaaaagcaacaggaggccattgattggtgggctttaagcaaagaagtgacctagtgacaaacccattcattcaacagcaagtaggaattgagcatcatctctctgtcaggactattctagccccgggggatactgcaatggacagaatggatgcggtccctgtccttgctgggcctgtgttctagttgaggcagcttatcatctaaaatgcaggagtcgatgtggaagaacagccaggaagctctcgtgtgttttaggtgtgagataatagtagtagtggaggcacagagaagtaggcagatttgagaaatgagcggctggctccggctcagcttcagattgccaagcaagaagagggatgtttgtctctcagggttgctgtcttgggccatgggaccatatgttctgggaactctggtccccaccactcctccaccccatgaaggggaatccccaggcatcaaccctgaatgcatcaagctgccctcctgggcagcagctggcttcagttggggaagcctctggccaccccggtcccctaccccacccttctaggtgggatctgtgcccagcgctgcatccatccatctggcctgacatacatcagtgtcaatccctggctgcaaaggcaatatttataaatcacgtttccaaactggctacacatttgtacaaagaaacagatgggttggggtagccgtttgtcacctaggatatttatacagtgaggaggagggggcttggcaagtagtgggaaggggctgagggactggaggaggaggaggccttccacggctgctgtgacctcagcgtgctgctgccaccctgtccccggagcttacaccaggtggcactctggatggcagctctggtgcccccccctctcccccagctaaacaaaagcaactgaggcagaatctcgggccccttgggttggaaagcctggtgaacttggcagagttgagccaaggctagctgtgtttcctgtgacctgctcaggatactactggactaatgaataggcagggctgtactggttgttaaaatattgaaatacttccaaaaaaggcttaaatagctgttgacactaagccccccaaatctctccctgctgcctcagccttttccccaggcagcctcccaactttgacacaatcaagccacgaaggagttaatgcctggtgtagtaaagtttccagggtcctgctccaggttttggtcagcgtcctttctgattggccatctgagctgcactggttgttaaatctgtttattatttttcattatttatttttaattattgattgactgagacaaggtctcactctgtcttccaggctggagtgcagtggtgcgatcgtggctcaatggagcctcaaactcctaggctcaagtgattctcctgcctcagcttcctgagtagctgggactacaggtgtgcgccaccatgcccagctaattattattattatttttaaagagatgggttttcactgtgttgtccaggctattctcaaactccttgcctcaagggatcctcctgccttgtgctggagttataaacatgagccttacatatttttaacaggactcccaggggtacagatgggtctggcttcagaggccactaaggctccgcattgggtgtgagtgtgtaaaggccttgagaaggatcccagacctgttccaaggccagaaggaacccacatgatctggccccctcgctgaccacatctcctcccagtcctgtctcttactcactctaatcacacaggtctcctccattcctaatccaccccagtcctgctcaccacagggcctttgcacttgctatttcttccactggggtggtcgttttctctcatatcctttaggtcccttctcactatggatacccttggagagtccttcccaggccaccctatttaagaagatagcttctcctcttaccctgctttctctctctctttttttttttttagatggagtttcgctcttgttgcccgggctggagggcaatggtgagatctcacctcactgcaacctccgcctcctgggttcaagcaattctcctgcctcagcctctggagtagctgggattacaggcatgcgccaccctgctggactaatttttgtatttttagtagagactgagtttcaccatgttggccaggctggtctcgaacttctgacctcaactaatccgcccacttcagcctcccaaagtgttgagattacagggctgagccactgtgccctgctttatttttcactgtttcattgaacacattttatcaaacacctacgatatgccaagcactgctccaggcacctagggttgaacaaagtcaagtccagacccttgtggagattgcattattcctccaccccagccacttatcatccccaacatacttttttatttgtgtcatttctgtctcacctcactagaatataaactaggttttgttgtgtttgctgttgcatttccaggacccggagcagaccccgacacagaggctttgtgtctcaataaacactcactaaataattgctggatgtaggaattgacatttctaggtattaacactatatcttggtggcccttatcttactggggctacctagccacccgaggcagtaggtgttactcccattttagatgatgaaactgaggcttagagaggaacaggcgccccagcactttggtaggccgaggcgggcagatcacctgaggtcaggagttcgagaccagcctggccaacatggcgaaacctcgtctctactaaaaatacaaaaattagcctggcgtggtggtgcgtgcctgtaaccccagctactctgaaggctgaggcaagagaatctcttgaccctgggaggcagaggttgcagtgagctgagatcgcaccactgcactccagcctgggcaacagaatgagatgctgtctcaaacaaacaaacaaacaaaaaacaacaaaaaaaccccacacgcatacacacacacacacacacacacacacacacacaaacaacaacaaacacaaaaaaaccagagaggaacaggagcttgccagggtggtatagagcacccttcgctgagcctggtcccttatttccagtctggtgactgcccccttccctcagtctattccttaaaggttcaaacatcaacatcatgagaaacttgtgagagccagaggggaggaatctcacagtggactcaggcagggcagggcagtttgctttccaggtggtgtgctgaggcaggaagcacactggacttgggatggggttgggttgaatcctacccacaccactgactccctatatgaccctgggcaggactctttctctcttagagtctcagtttcatcacctgtaaaatggggagaggagtcagaaaactacctcacaggatggctgtgaggttgcagaaagaaatgtgagtgggcctggcgtggtgtctcatgcctataatctcagctctttgggaggccgaggtaggaggattgtttgagcccaggagctcgataccagcctgggcaacacagcaagaccccatttctacaaaaaataaaacaattagccagatctgatggtgtgcatctgtagtgccagctactcaggaggctgacgcaggactgcttgagcctaggagatcaaggctgtagtgagctatgattgcaccactgcactgctgcctgggtgacagagcaagaccttgtttcaagaacaattccaaaaaccaaaaaaggaatgtgagtggaataaagcagtttttaaactgcagggtgggctgggcacagtggctcatgcctataatcccagcactttgggaggccgaggcaggccgatagcttgagcctgggagttcaagactagtctgggcaatacggcaaaaatcccgtctctacaaaaaatacgaaaagtagctgggcatggtggcacacatctatgctccgagctacttgggaggctgaggtaggaggattgcttgtgtctgggaggtggaggttgcaacgagccactgcactccagcctggctgacagagcgagaccctgtctcaaaaaaaaaaaaaaaaaaatcaaataaaaagccagaaacctgcagggtggggagtgtgtgcacgtggcttacttcagtctccactcagaacgggggctctttccaccctggactctggcacaatcattcctcatttattccctgtctatatcttcccatctgccatttcttatccttgggacgccctcctccactccaccaacccacaccctgcttgtgtttggccagtgggctgggtaacagctccagcttggcccagactttccatgtgatcttagatccaacataggccctgtgggcgcctccgtccctctgtctataatatgggaacagggcagggagactgtgcccctcccttcttgcatcctagggtttggaggctcaccttggatgtcaagcagagagaaatgagggttgctgggagcttcaggcaccaggcggaaatagaagcggtgcccgccttggggctcgtctctgtccaccacgctgatggtctggatgagctgaagggtgaggaggggatagagggctagtggtgaggctgagaccactctgggtcgaggtagaggatgctgctggccagtcctggaagcaacgcccagtccccaccccctcaggggtacctggcctggcttggcatcctcgcatacagctgcctcgtagggtgtggccagttctgggggattgtcgttcacatccaggattcggatccttagggatgcccgggatagctgtgcatgattgtctgtaatgagagcacaggagcaaggggagaggcatcaagtgggagatctagatagcctcctctctactatgaggacaatagtaggcagtggggtcatgctgagaaatttgtgggttaaccaagctggtacaaggaccagaactgggaacatttgggcataagttaagtaatcatcactgtaatcaccaccaccattaccatcaaccttggcaccattggcattatcactacaacgcttgccaccacaatcaccagtagcacccactgccatcaccaacaccatcaccactgtcagcatcaacaccaccatcaccatcccatctccaccatggccacctttgccatcactaccactattactattaccactgtcatcattaagccattaccaataccactatttgcattatcatcagtgcgtctatcaacataactatgagtaccaccatcaccatccttatactgttaccatcaccactgccatcaccaccatcaccatcaggtcatcaccatcactaccatcaccattagaattagcaccaccaccaccagaaccacatcctctagtactacacccatcatctctaccataaataatactaaagccatcaccatcactaccctcaccaccaccaccaaccccatcaccatcaccaatatcaccatcaccaataccaccaccatctcttccatagtcaccacaaccacaatcaccagcccacctattactactattacccccatcataatcaccaatattaccatcacatccctggcccccaacaacactgtcatcaccactgccatccccaccccctcaccacagagcacacagcatgcacgtggagcatctacattcattattttaagtatccttgcagaaatcctgtggtttggtacaatttctatccccatattgcaaaggagaaactaaaacgtgggatgctttctagacatgggtcggggcaactaaactccaagacttctgctttctcaagacctgatcctaaaagggccagacaagtccaaggaggtagatcttcgccagcaaaaccatgatgtccccacctctccaagttgggacgtctttaagatcatggtccctgtcttatttatctctgggctaccagcattgtgggatatggtacatgtaaattctaatatattaatatttgctgaatgaatgaatgaagcctggaaaaattgagactgcaggaggcttgaattccaggcgtggctgtgtccctgacccagtgtttggtcttgggtaagaccctgccttctctgatgtcagtttccacacctggaaaatgaacagagcatagtgattatgagcagtgctgggtagttctgattccagctctgctgttttatgtctgtataatccaagccaggtcatttgacctccctgtgcctcaattttctcacctgcaaaatcggtctaatattgacccaattatgcctagcgttccattattggaacgctaagcatgtgagagttatttatatcctactgctcaaggacttcgccaaggtctgattgcaaaaattcaaaaaattgcaacctcaggcataaatgggttaataggtcggtgaagagacagattgagttaatatctgcagggcatttgaaactgtgtgtacaacacgtagcaagtgctatataagcatttgtaaataaccagacattctcgaagggtcctattagcaataacattaaataattctaggatgtggaatacttcatcccagcctgtcctctctaagcagtgccctgaatgttggtgctttctaacccctcaccagcccagacctctgagtgctcactggtgctccatcctctgctatcttggctacatgttcattactgacatgttccacctgccagtgacctcaggaacatctcctggaggaggaaaccacacctcacttccaagcagtgacttagaagatggggctctctggctgggctggcagggagctctctgaggggcagcctgaaagcttccaggcatccaggctccccaagagtttcacggggagtgggactggtcggctgcctcctgctgtaaactcaggatccactgtgtgctgacggcagctgctcacgtgttgataaagagagaaacagagataggaaggcaggtgcagccacctcctgggggggcgggcggcggtcaggaaaaggagggggctgagttcttaattaattcagaccccagcttctctctggagttccccttagccaggggcacattatcttctaagctcaccagatctgccactccagtgattagagggggcttttccagggcgagagatgggagtcgtgactgggaatgccgggtgaaccgttatttttaagagtgcgttgccggagaatttcaacagacagacggtcggtgcttttgggaagaggggggtgaggcccacagccaggaacaggcgcctctttcccagcagaggcagagggagagtagagggggcggccagggcctgagtgcccttacagggccctttcccctgcagtggagggtggtgggggtgtgtgggctggagggagagacagggtcctatgggccatgtcgaaggtacagcaggatggactgctgagtgagtgatccgctcctggatgctcactgcagatgagacccccattatagcacctttgctttgggctatgctcggcctctcttacctcttcttttaaaatgtcacaggtcaccttgtgagaaagccctaatgtccttggcatgagtgagagtctcagacctaagaggtggggcagctgagtgacccctaaattgccatctgcatatcttattctaggaattcctgaatttagggctggcatggaatcccagagctcattggctggccccaggtcagtacccattgccactgccattgcccttgtggcagtgggtctccagcacagctgtacatcacaatcacctggagagcctttaaaaacaccgatgcccaaagcttggtcagtgattttttttttttttttaaacagctccagaggatcagcctgtagcaaggtttgcaaaccactatgctagggtgactgggaggcggggggaatccagcctgattggcttcctccaaacccctcctatcacaattagtatcatttataagaatggaaaataatcgtattttgccaccttaaatgtttctgggataaaacaaggaatccatctgttgattaatcttgatctctgtgcaggattttccaattcataacactctctcttattatgacctcgtgtcatccttgaaataacccttgaagaaggccttgttaaacccactttctggatgaggaaactgaggcccacggaggggcaggagtttccccacagccctagcggagtcagcagcagagctggggttgggtccgaaccctcctgactccaagttcagcgcttggtcctgatacaatgtcaggggccctcctgctgcctggtcatttgtccattcagtggcagctatggcttagacccaggcccaagtggatctcacccaatggccggctgcaggtgccccctccaaggactgggtgccccacagccctcccctcttggcttttcagttcagctgactgacatgcaaattagtttaattatttcttcttctaaaataaattatattttgcagtagctgcaatatgttgtgtcaggcaaaattacattcaatatttttaaactaattgatgcagccttgaggaaggctgattgacagcccggggctgagcaggcctgcagccttaaccgattcctaaattaaaattaaacgtgctttggcccggtgcttcctccttgaactgcctcaccattaatccgggggggtggcaggtgaagccccgggggtctgagggacctgaggaggctgggcagctcagggtgcctagggtagagaccaaactcggggcaggagaactgctgtgcagtggggcaggtctctcaccttcactgggcctcagagtttcttctgtataatggacaggggattggactggacaatctggaactgaaacctgtggtttttgctgacagttgtggatcaagcatctcctttgtaccaaggactcagcagtgaacaagacagcatggtctcgttctagtggcaggtacagacattactccagactgtgataagagctgagggaaaaaagttaaggagctgtgagagcttggagcagggggtcttgcctggtgggatgcaggatgtttttcctggaaaaacatgatatttctgctgagtcctgctgagtcctgactgggaagtaattgtatgagggggatgggaaaggaaagactgtctcaggcagtgggatcagcacgtgcaaaggccctggggtgggaggggaggatgtggataatgagactctggatctcttccaaggaggatcccagcccctactagagttactcatttgacatctggaccaacctgagtgggcgtggggatggggatgggggccaatgggaaggcaagaggagacggggcctggcctggtgcccctgttagggcgctcctatgaatgtgctcctccctggaagaatggcaacaaacacacattaagtacatgccaaggaccagggtctgggctgccccatttcgtcctgtcaaccacggtgggaggcagggagtgctgttgttgctgttttactgatgaggaaacgggctcagaggggtgagaaaacttgcccaaagtctcataggagctgggactcgaacctgggtctggttttaaaggggagtttttaaccaccacatgatgttgcctttcttgtctttagctgtcagaatccatcttgccttcaaggccctgaacaaatttccctgcttcctccaggaagctttccttgattgctctcagttctgggcaatccaaggataagcccaagtcccccatgcccacaaggccccccatgatcatcctgctgtggtctctctggcctcgttgctacccctccctccttctttcactctgctccaagtttgctcctttacctccttcaggtcttggcccagatttcttctaggagaggcctcccctaaagaccttatttccatgtgccctttgccatcctaccaaatgccacttccctgccttattcctctttgtagcatttacccagcaccctctgtttttatttaactttctcatcctctatctcctcccctagtatgtaagcagaatttttgtatattttctttactgctgtatccccagcaactgtgtgcacactacatagtagatgcttaataaagatgtgtcaaatgaatggattccactgtctgtggcatttctgaccatggccacgctccaggagggatgctggggaggtgcagggggagaaactgagaccttcttggatgaactgactctgttgtatcagggattgggtcccctccatttcagaaacagtctagtgctgggaccctcttcctgcctctctctttctctgtctcttgaccaaggttttctcatcagtaaaacaaatggagttggattctgtggctctccttggctgtcacagagaaagacagaagcctggagagaaagagagaagtgaagctgcaagagtgggagtgggaaggagagtggggggtggagtgggagggggagagagagagaggagagaggtcagctcaaagaaagtgccttccctctcacttgcagtggcagggatagagcagagcttggaccctcttctccactatccccccagcccctccctcctccccgagggagttaaattgcatccaaacaccaggctctgattagagctggccagctgggcaggaagatttatcatcccaattacaagcccgccaagacaagcaggcaggacagtgaggcgcacgggacgagcagatgggggtgctccagggaagggggtgtcagggtagacagaagcgaactccttgcactccctgccctgtccccatgcccccccccagtgggagcaggaggctcaggtgcccttctctgtcccttgaagggacttcagtgatctatttggtttccacatggagactggaagctttgaccttattggggggacgtttattcctccaaggaaggggtgggggaggacttctgggtgaagcagggaccctgaaatcataacatccctgaaattcaaaggggagatgtgggaactttccttccccagtggctgagctggtccctaatgttctgggctgtcctactccatgtatatcacaaaatctttgttccccttggggtccgttagggactcaaggtggcacaggatcccaggagtcatccagtccaagaggaccctgggcctgatttgcacacctctggtgacagggagctcactgtctcttgaagcagccccttccatgcagagctgtgacatgtctctttcccgggcagcctccctggagctcccaaccacctgccctggtcctgccctggaccctccagcccaaagctgagcctgacagcctcccatatgttcccccgactccatgtttgccccctccaagccatcctccccatgaacccgagggaacactggggaccaaacatctgatcacgccactcttctgctcaaagacctgtgctggctccctgtcacctccaggagatgtctggttcctcatgggacaccaaggccctttctgtacaggcccagtgagcttcttcactcaccccttgcctcacctgctctggacacccttcagctccagagcctggccacacccagcctctctgttctcagaatggcctcagacatccaagctcccaggcctttgcacacagggggctttctgctgggaacacctgaatcccctttctgcctggaacacctgaatcccctttctgcccatggaaaaacttccttggcctttgaaacccaactcagatgtcctcttggccaggtgctggtgctcatgcctgtaatcccagtgctttgggaggccaaggtgggaggattgcttgagcccaggagttggacacaagcctgggtaacagagtgagagccccctctttaccaaaaacaaacaaacaaacaaaaaccacacacacaaaaacaaaaaaatagatgtcccctcctctgggaagggttttctggccctcgctgggtaggccagtctctccctgctcctcaggaatcgccgcgaccccatgactttcactgtgtgttgtcactgactgtcaatgggtctctccccgcccacccgtgaactctcaggtcagtggccaagcctcgttcatcactgggtctcagagcccagccctggctggggtgggtgacaagaggccccagaaaacactggctgcgggtacatggcttgttggtgtgtgtgtgggtccctgcaggagaaactgagcactctctgctgctcagaccccactgtgaccttcactcctcatccctgtccctttctccagcctccttaggcctcctctatggtccttctgagaggcatagactgggagtcagaaagcctcatgggggaactcccttccttggcgtctgtctccccaggttgggtatggggctggaggatgggtatagggctggagcccatcatctctgacattccctctcctctcagattctctccctgactattaagagcacctactgtgtgtcaggcacacagtaggcacctgcgctaggcacttgaggcacattatttctaatccttgggggatttatgttttatagaaagcactcagcacaatgcctggcatattgtaagctttaagtaaatagaagctgctattattattaattattttttgagatggagtctcggtctgtctcccaggctggagtgcagtggtgcaatctcggcccactgcaacctccacctcctgggttcaagcaattctcctgcctcagcctcccaagtagttggaattacaggtgcccaccaccacacccggctaattttcgtacttttagtagagatggggtttcaccatgttggccaggctgctcttgaactcctgacctcaggtgatccgcctgcctcggcctcccaaagtgctaggattacaggcgtgaaccaccgtgcccagccaggagctgctattattaatagttaccattgtcacagctatctggtaaactaagtatgattgtcaccattttgtagatgacaaaaccaaggtaacaagatgggagtgacctgtccaggcccacccaactgggaaccatgcgactagaagcatttcttctccatcatgcattcctgtttttccaactgggcatgcaagcccattcattcatccattcggtaaacacacatgcctactgtgtgcctggcctgtgtgtgctgcaggtatagactgggccctgccctcatggaaggtacagtttcccagggaagagcgatcttcactgaatactcacacagacccatctaaaaatcataacacgtgctctgtggcatgaagggaaaagcagggtgctgtgagacgtgacttggcctggggtgacccagatggggaagcttctggcgagtctggttaaccctttgctgtcctggacatctagctattacccctccagatcagcttagggctggatgactcttgagagtgtggctgggtgccccccttggcactcccgcctcccagtgttggttttccaagtctcccctagaccccccccccacccagtctctttgaagactgtccctttacaactgccctttccaccgaaggattcagacacaaattgtactttaaattcaatatcagtcattaatatttcatgattacaaaacgttaaagataatgtcagtggaaggagcgtctgcatgggcagaatggatgactcagaagttcggggagaggggagccggcatactaagtggctcgggagtctttgaggtaatccagtatgacaggcggtggctcctggctgagtgcaacattctccgaggtgctcaccaagcgccgccgctgtgtataaatatttcccctctgattcttgtcacctcatgtttattatgaccaggagcaggtggggccaccatgaccctctgagtttcccttctgtttttgaggaagccaaatggacgctttggcaggagggcatggggctgggtgggcagacccgatggccatgcacctggggctctggctggctcctgggaagccggaggtcttgggtcaagcctgcccctgccaggacttgctctgtgatcttggggccatccctgttcttccctgagcctctgtttcctcatctgtaaaatggggataataagtttgttcccatctcatggagatggtgaaaaggaagagtgggtcagttatttgtggcagctttttttttttgagacagagtcttgcctgttgcccaggctggagcgcaggggcatgatcttggctcattgcaacctctgcctttgggttcaagcgattctcgtgccttagcctccccagcagctgggagtatatgcacacgccaccatgcccagttaatttttgtatttttagtagacatggggtttcgccatgttggccaggctggtctcgaactcttgaactcaagtgatctgacccctttggcctcccaaagtactgggattacaggcgtgagccactgtgcctggcctgtgagagctcttgattttgtgccagcaccagggaaacaggactggaggggcagctgaggagagccgggctctggagtcaggcaggctggggttgggaacctggacaaatgacttcgccttgctgagtcaggttcctcatccccacagtgaagatggcagtagaatggacaccccttaggggtgaagatttcatgagctcatcacaagaaagggcccggaacagagtcaagacctacagataccatcaactgagcacttactaagcaccaaccactaggctaagttcttcccatgagctatgctgtttgatcctcccaccagctctctgaagcaaaaccattccttttcccattaattaatatcctgggtgaggagtgggcaggggctggggatcacagctcagagaaggggggtctcgagcccagtggctagtcttctcctttcagagatacatctccttccccacagtcagttactggggttgatggatgggatgggggtggggctcagacagcagagagtgcccagaaaagggaggccatgcagcaatgccgtggggaccaagcatgcctggtccaaatcccagctttgccagtgcacatctttggcaagcaagtttccaaactctccaagcctcaattttcccatcaggaaaatgggtgctaatcatgctactgatgataattcaataaagtatgtgctggaaagcatctaggccaggatatatatatatatatatatatacatatgaagcaaaaattgtaaaatgtttgtggaggagtacccctcccccgattctgtctcctatgaaatggcagccttacaggcttcatatgctattctagctgctttctgaaagagacccactgggtagaagcacaatgcttaacccaagaggagattgttgctggtggtgggacactgggccggtgataggctggtggcggaggggcgtgtatctgtgagtagggagaggaggcatccctgcccagcagccaggccagtcctccctcactccatctacagcccagagcctcagttgctacccagggaacaggtttgaggaggcaaggagggggagctctcttcccccaagtccagccaccacttcctctccagccacctttgttatctccctttcatgcggtagaggagtggattcaaaggctccagagcagcagtcactgaggtctgagccagctttgtatttccttttaaactgcagttgaaagagacgaagggaacttcagcctagggacttccttgaccccagaatgggccagtggggcctgggaaatggggggatggcagctaggggaggaggaagagggctggcaggaggagcttgggtcaggaggggcctggggcagaggggcctgggatcctgatgggcagaggcgagtttgaatgttgcctacccgcctgcagctcagagactcaaccatattcctgttgtcatgattgcttattggtggctctgttgatgcctgagaccttgagggctgatggggtagagaagctgggaaagcaggtggaggccatgacagtggcagtgttgctctgggcatggaggaagcccaagggcactccccctggcctctctcccagtgctctcagctcctcacctccacagccttacttacctggatgccatgtctcaggctctctctctttctctcccagctcacatttctccctagctgcaccaaaaagacacacacacacacacacacacacacacacacacacacacacacatattcttccagaaactcaggccaaacaccctggagtcatccttgacccttctccatctctccccgggacatcagcccatgagcagattccactggctctatcttcagcctgtatcccaaagccagccacttctcacctcctcctcccctcctctgtagctactgccctgggccaggccatggtcctatctcccaagcactattgctttcagcttctagctaaggccccgtttccctctcaggctccaggctcttctcaatgcagctgccagaggtaccctgatggagaacatccctcctctccccaaatgcctccaatgactctaacttcatttggagtaaagtccaaagactctccagtggctctggctgaccacgctgcccctcatcaaccacactggcctctttgctgttcctccaacgtgcttggcaaattacaccgcagggcctctttgcactggctgttccccctgcttggaatgctcttcctgcagatgtcagcatgactccctccccttttgaggtctttgttgaaatgtcttttcctcatctcttagatgttcccctaagagaagcaacgcacctcctcctcccagttccctttcccagcctccttctctccttgtttcttcttagcacttagcatcacctgacatattatgtccgtgctttctctctgttgatagtcttgttctccctatgaggacagaagcttttctgtcatgttcaaggctggatccccaacccctaaaacagggcttgcacgtagcagatgctcaattaatgatgagagaagaaagcctagtttgagaccagccctacccccttgacttggaaccagccctactcccttgacttgcaaccctgctggatctttgctcgcacccatcagcttttgccctcgccttcaccgctgtgagatctttgtctagtttctttctcttcgcaccatccccaacctttggcccctcccccgtgggctttgactgacagggctgccttggccctgcccccagcccttggcccctcccttcagcttttgctcctgggccccatatttgcccttggagggggcgtggcgcccagctcacccgcctccatggccagcactgtgatgttgtgccagccggccgtctcgcggtccagccccttgccagtcacgatggcgcctgtgtccgcatcgatatcgaagatctggtccaaatctgattcgcggtcaatggcgtacctgcggggggcagggcagggctgattgaaggtgccccagtgccaaatggagcccatgtccttttctcccaaccccactccaagagagggaccgcctgccttggacacacacaaggggcagagaaaccccttgcgaccgaggaggagcgggaagcaactgggtgtgcatttcacttgcacgggtagctgctgtgaccatgggcagccctcaacctttctgagcctcagtttcctcagttggaatggagctaataatttgtacctgcagttgtcgtgagggttggaagctggcaaaatgcttggcacagttagactcactgatactctcttctttcttttcttttcttttcttctttctttctttctctctctttccttccttccttctttttcttttttgtttatttattttattttatttacttattttttggagatggagtctcgcactttcgcccaggctggagtgcaatggcaccatcttggctcactgcaagctccgcctcccgggttcacgccattctcctgcctcagtctcccgagtagctgggactacaggtgcccgccaccacgcccggctaattttttgtatttttcagtagagacggggtttcaccgtgttagccaggatggtcttgatctcctgacctcgtgatctgcccgccttggcctcccaaagtgcctgggattacaggcgtgagcgaccgcgcccggccctcttttctttctttctttagccagggtctcactctgttaccctgggtagagtgcaatggtgccatcacggctcactgcagcctccatctcctgggctcaagccatcctcctgactcactgagcctcccgagtagctgggactgcaggtgcgtgccaccacgcccagctaattttttttttttttttttcagagacagggtttcgctatgttgcccacactggtctcgaactactgagctcaagcgatccgctcgccttggcctcccaaagtgttgaggttacaggcatgaaccactgcaccctgccgattcttatctttccctaagaggtgcccctggaactgagcttgaaggcagagaccgggagtgtgggtggcgttctgggcaggggaaacagaaggtgcaaaggcgcggcggctgagaattatcccagaaatggcaaacactgcaaaatggttcgaaccgggaagtggggagaattcggcaccagaacacaccggcacagcacagttggcgtgtactggggagccaacggggaattttgagcaggggagaggggggcagttgtggcattaggaggcttctctgggggccgcggcgtggacacgcccagggacacgcgctgggcgagtgccgtgggagggggcctggggacacggccgccggctcctcccgcctgcgcagcacgcgcgagctaatctgcagcttttccgttgccgcgtgaaaaagccctttgttccgccttcttcccgggcctttgtgtggcggctccaggccttaaaggcccgtgtccaacacatgtctcgggcggcggcggcccagagaggcctcgccagctccggcctccgcttccccatgctgataacgctggtgggggcgccgcgaggctgcgcgcggacaaaggcctcgaatgccaagcaagcgctcattgtgcgccaggacaaagcagcctggtaaggaggggcccctgcgcagccacccggcccctcccacaggcaggaggaaaggggcctttttgtagtctcccagagtggggaggggaggaccccagaagcattgcctgctggggcccagagccctgagatgacccgtctgtgaggccttggctgcattgccaaacctctctgggcctcaactcccccatctctgaaatggggatattgacacccactgggacttcgtgggtctgaaagcagtcagagctgggtttgaatcctctgccactgattctacctgtgtgaccttgggcaagtcactccttggcttctgtttgctcacctgaaaaagaggatgactcctactcaccccacattgtggtgttagaggaggggcgggcatacaggacagtccttatgcttttcatgtttactgtcctggaggtgaatgcctatggcaaactataaagggatgtgcctatgggtgtagtgggcattataagccgatcccctgaacccccagtttaatgctccatactgttcctaaactgctaaacccatattcttcttgcccctggccaccttgagtcccgctagcctgggcgaaagtacgtggggaggttcagacccacgattataattcctccctagcatgcacctaacagtttggagcctgcttctcccccaaccatccctccattcattcctttatgccctaaacactaattgagtgccttctctgtgctggtctgtgctagactctggggataaagtggcaagtgagatagaagaggtctcggtcaggcatcttatgaggctgatgtgatctcccccattttacagatgaagacactgaggtccagagaggaaacttgccaagcttagagctgccaagtatggttgtgcaggttgtgtcatgcacaaagataccaggccgaagtggggaagcaggggtgaattccagcgagccttctgcttgcccagccacgtgtcctagaccaggaagtatcaaaggggggcctgtttcttatttatacaaaggtgacaatgagctagtgatgccgatgccctgctcaagggtgtacagcgactctgtcacagaactgaaatttgaaaccaaattggggattctctcccagagtttaattttttttttttttttgagacggagtcttgctctgtcacccaggctggagtgcagtggtgcgatctcggctcactgcaagctccgcctcctgggttcatgccattctcctgcctcagactcctgagtagctgggactacaggcgcccgccaccacgcccggctaattttttgtatttttagtagagacggggtttcaccttgttagccaggatggtctcaatctcctgaccttgtgatccgcccgcctcggcctcccaaagtgctgggattacaggtgtgagccaccatgcccggccgccagagttctttttagcctgaccgacagcccatccaaagttgaaccagccaaatcctcgatgcatgaagcttcagggtcccctttgccccagcctggccccatcagatatctgagtccaaaggaggttgaaggaggctcttgagcatcatcagctcagctggaaagaactttggagacctcctcccattctacaggttggaggatagaggccaggagaggaccagagacatgacatagcctgggcttctgatccctcgtcagggctgggcgagaggccgggctgatgggaggatgccaactgccttcttgttgtttctcctcccttcttggctcagagctgtctcctctctcctccctccatgctgctgctgctcctcctcctcctcttcctccttctcctttgccctgtttttctcttttgttctttcctcgaggggaagggaggggctggaatctaaatggaggcagctgttcctaaggccatagggcgggggcagcggggacccgccattaactagctaaagacctggggctgggggtcagtttggctggctgagcccaggtgtttttattccagctcagggagccagagagtgagtgggagggagggaagcagggaggggtgggaggaagcagtgtgtggcagggactgtggcctggcaaacttaggggtggaggggtggggtgggggcgaagcttgtgcagctcacgtgtagtgctcgcatgggttgtgtatttggtctgtgttgtgggtggacagtgtgtgttttgtgtggcgtgaatatgtgagtggtgttcctgtgtgtgtgagattgtgcattatagttgagcagtggctcaagaggcagcagctcagccctgggtctggatccaggtctgcattgcccccaggcaagtcacttccatctttaattcccagcaaaatagagatgataatcctactttgtaagttgtcgggagaatgaaacgcatgtaaggtgcctagctgagttccaggaaaattactccatgaatgggaactattgtcactgtaattattattcagagatgtctggcagggagtacacaggagtccccccaacccagtgtgtggcttgcatgcctgggggcggggaggtaagatgtagggacacagtagtctgagaaggacaggaggaagctgtgggtctagaaggttctgcttaaattttgcagtcctacttctcatttggtgacaacaacctgaagggcagcaaggggaactagaacaggtgaggctgggggaatagggagagaatatgagtttgtggcagctcgtgtgtgtgtgcacccacacatgcaagggaggcctgggaatggtgcttaggggtgcagatctgatgcccatctgcctaggtttgaaacctagatgtgtgaccttgggcaagtcacctaatctctctgttcttcagtttccttctcttaaaaatggagatagtaggccgggcagggtggctcacacctataatcccagcactttgggaggctgaggcgggaggatcacgaggtcaggagtttgagaccagcctggccaacgtggtgaaactccgtctctactaaaaatacaaaaaattagctgggtgtggtggcatgtgcctgtaatcccagctactcatgaggctgaggcaggagaattgcatgaacccgggaggcagagattgcagtgagccaagatcgcgccattgcactctggctggggagatagtgtgagactctgtctcaaaaaaaaaaaaaaaaaaaaaaaaagagagagagacagagatagtaatacctacctcacaggctggttgtgaggttcggacaagtgactaccaagaaatccttaagatggttcttggtgtacagactagctcttacttttctttgttgagcaagactttgtatcatgagctcttcgaatcctcagatactgtcatcactctcattttacagaggaggaaactgaggctcggagaagccaggtatcttgccctgggtcacacagggctagttagtggcagagccaagctcccatgtctgttcagagccggaggtctaacagcatcctcttaaggagccagccaggtacacctgctagcatttctgtgttagcaacagcacaaaatgctgctgttgtcaaggttagggtggagaaaatggggagggtgctgcttcctggctggggtgcacgtgtggttttcctctacataaatatgtgcatatataatgcatgcaggcataataaatagggaaggctgcaggcttatgcacatacaggctttctggtgtgcctgtgtgtgagtgcatgaacatacgagcagctgactgaatgatgcagctgccgcccaagctgctcgtgtgtgtgtgtcggggtgtagttcgggagcctcttccaaaacaaagcagcctgcctcctgctccactgtcccaaccaagggattcctttctgctcactccaccctatctgtgactcttttcccccactccctttaggcatatacagaaaagcccacacatgatgcctggaaaattgtatgtggttaacactagttgcagaatgaaagggaaaaaatgggtgtgcagaccaccaagaaaaatggtaatgaccatttctcgagggcctgctatatgctaagcacttaatccttcttccaaccctgagagcaccaggcacagaacttggtatgtggtagacatttaatacctatgaatgaggcacatactattatgatgtctattttagagatggggaaaccgaggctcagagggggtgcattgacttgcccaagactccacaactgagctgggatttgaacccaggtctcctctgatttcaaagcccttgcagtttctgctgcaccacactgtggagtgctgggtggagaaaggaagtgttcgcttcctctgctgcagtgtggactagctgtttttgatgatcaaaggagactcacaatggggctaggtaggaacgtggctgggctgataaatggccagtctatctgcaaacctgcctaactgagaggtgggcccatctgagcactttcctgcctccttctcaagccttctaaggcttcccactgcctagaggataaagtcccacttcttcatgtggcattcaatgtccttcgcagcctgtctccaagtgctcccttgtcccttgtcgtgagcttgtccagctggtctcgctgctcctgaacttaacctcctggctccatgattctgtccctgccatctctcctccccatcactccaacctggggcacactctccccattccaagccttgtcctcttcgtccccttgcaggggccttttggggcaaacctctgtcactccccttcctggtgcataaactactcacccctccctggagctcctcaagcccctgcctcagcccaagcccacttggacctggacctgtcactggattcgttcacacgggccaagctttcccactggcccatgtctgaggccatcatctctgtggccagtgcacaggggaggacgctgcaccagtttaggaactgcactaaccacaaggagagtaagaagcaggagtgaaatggccaaaggctggattcaggaagtggtgagtcatgggtcaaaccccggtgcttccccttttgagctgggtggctttgggaagtcatttcccctctctgactctcagtttcttcgtctgtcaaatgagtacaataccctctgaagggtaaatgtagtaacatgaggcaccttctactatctccagtgcagatgctaagaaaaaatctctctgtactgtctgctttcctataatttccaggcactcactgtgccctgcaaaccatgctaggcaaagtctcccaggatgccacctcatgtcttcatttccagggacacgccaagcttgttcctgcctcagggccattctgcttgctgttccctctacctggaatgcttttcctcacatttttgcatggatggctccccatcattctgatctcagctcatgtgtcacatccctgaccactcaattcaaagtggccctctgtggccccaatccctccttatcctatcactctattttcttcatagtgctttcagcagttattccatttaaccatttgctgtctgtctctctgcaggagaaggcaaactccacgtgggcagggatcctgttttatcatctctgcttcctcactgcacagaacagtgccgggcacaactcaatgcggagttgctgcctaagcctgtgaccctgagaacgcaggtgctgccagaatggaacccttagagcgagctggactctggcagcacacatggcctgtgaggaccccttctctgtctcccacagaccctcaatggcctcccatttccatttttgtaccccacagtctgggagctccaccccagttctgtccttggctgagtcatcttggtgtccccaggcctggctcagggcctggcatggaggaggagctgggtaaatgtttgtggtgttaaattggaccagtctccagctcctcactgcctccacatctgaggagccccagggaaggggccggcaaagagagatgaaagaaggtgagaagcaggtttcaaagttggccctttcagtgcagataaaagcaggagggaagggagccaaagcggggaggaggaagaggactgagagggggtgtggagagtggaattggagaggaggggagctggcagatgggaggactgacctggggccaaggactcgcctcccgctccgtgttcttacctccctgggagagcctgcagaatcctcctcccctccctgggcctcaactcccagacaaacagaggtgacagtgcccttcctggagaggtctgggcccaggccagaggccaagggggttgttcagagactatgccaccagcccgggtggaagggagtggaggagttcagaggcagtgacaggatggcattggcagcgagtgtagtgaaagtagcgtgggcattctcggcttcaggacagagtctgagctcctcagcctgcctctgaggccctgttagacttcacttttgtgcctcatctttcccggccccctgtagcgatcacagtctgctcttcttcaggcacaccaaccactcctctgcctgtatacctctgcacaagctgttcgtctgtctggaatgtgcctctcctgatatttacaccatacccagatacctaggtcaggtcaattcctgcctccttcagaagtcttcccagactcctggggctatctcccagtctgagaatccatgaacagttaagcaggatagcatctgtgtgtctcacttagggctgccatgtaaggttgaacaggctgtgcactgcacaatcctgatagagccattcagacagacaatgacggaacgttgccctctggagttgcacaatgcagaggtcctcaaataaactttccctccccctctcctcaatgcccagcacagggctaggctcatagtcagctcaggggttactcattgaataggtacaggggttttgggaatgaatcagggagccccagtgcctccttcccatccctctaacactggccatccccccagcccctaacctcctcctctggatcagtttcttctacagcctttcttccctcttctatctgaacatcttccagcctaggctactgtcagagactccccaatacttacagctcccagacccttccagggaccccagctgccccatccctgctctgcctctggcttgcctgtgtctgtgtctatttcttcccttttctggtttcctctccaaggtgcccttctgtttccacattgccaggtcagtccctcctgtcctctttttatgggcttttctttctctccagtctcttcctctcattgttggtctctctacatctctgtgagtctgtttttctgcctcttttttcagtctttatttttattttttagtttattttaattaattaattaatttatttattttgagacagttttgctctcgttgcccaggctagagtgcaatggtgcaatctcggctcactgcaacccctgcctccgggttcaagcgattctcctgcctcagcctccagagtagctgtgactacaggtgtgcgctaccacacccggctaattttgtatttttagtagagacggggtttcaccatgttggtcaggctggtctcaaactcctgacctcgggtgatctgcccgcctcggcctcccaaagtgctgggattacaggcatgagccaccacacccggcctctatttttacatatcattaattcaccacatattcagcacgtgtccactgagtgctgaggcctgggctaggccctatgggtatagtggtgaacaaatagacgtaaatccctaccctcagacagcttacctttcagtaggagagacaaaaaaggtaatcagaaaagcaggtagcatgtcagatggtgatgaaaggtaataaggaagcagcagaggaagacaggggataggaagagtcagggctaagggttggggtggagttgaaattttaggaagagtggccagagaaggtctcactgagaagatgacttttgagcaaagacctggaggaagtgagagagcgaactatgggggctattagggcgagaacgttctaggccgagggatccgctgtagcacaggcccagagtgcagatgagcgtggtgtgtttgcaaggctgtgagggggccagtgtggttgcagcagagtggactggaaaggagagggaggtgtggtctgagaggttcagggaggccagagctgtcattgtaagggcttgggcttttattctgagcctagtaggtgtctttggagggcttgggcagagcagggccaggctctagttcacatttgagcaggatcaggctggctcctgcaacaattctaggttaaagaggggtgaggacagaatcagggacaccagcaaggaggcaactgcaatactccaggcaagagaaaacggtggtcgggaccaaggtggtagcagcagaggtggtgagaagtggtcagattctggatccatttttaaggtagagacagcagaattcgctaatggattgaagggaggcatgagagaatgagaggaggcaaggatgcctccaacgtttttaacctaaacaactggaaggatagagctgtcattcccaagatggagataacggcaggcaaactggtgggttttttttttcttttgatggagagaccaggaacccagttctgaacttaagtttgaggtgtctagcggaacaccaagggagatgatgagagggaagggggtgcagggagaagactgggggagtcctgggcacagggatggcccagtcgagagatcagggagccagtgtggctgcagccagcagcgcggagaccccgccagtgcagtgcccgcctctgtgtctgtccctcctggttctctcccttattggcctggctcgcctgcctgtctcattgactgttctcacatctgcttccttggctctttggctccgtgcctgtttctctccacccgtgcgcctctctccgcgcctccctcccccacgcagccccttccttcggccctgcccgccccagccctcctcccctctgcccgcagtctgtccgcgggggtgatggcgggatagcaggcagcaggcgtcggccccgggcgggggtctcaccggacgggccggttggcggcgtcggggtcccgcgccgtcaccacgccgaccagggagcccacctgcgcgtcctcctgcacctccaggaggccggagggcggccggaactcggggggctcgtccacgtcggtcacggccacgcgcacgatcgcctggtcgcggaacgtgcccaggtcggcgaagcgggggtccacgaacttgttgagggcctccaggatcacggtgtgcacgggctgggattcgaagtccaggcgctgcgggagggagcagagggccggttagtgggtggggtctggtggacactgaggccttcacgagggaggccaaggcaggcggggttggcccaaggtcacacgttgtctcagcaggggcggcagggatgtttgggctgcattgcagaactgacccagaccaacccggtgggttacgggtggagaaactgaggatcctcgaggacagtcttgcctaaggacacagccactccaggctaacgcgctgagcacccaaacttcctgcttcccagcgcagtgttggcggcatatttcattagtttagttcacgaacacaaagcacctactgtgtgccagtgctttaagtatattaactcaacttgacatcaaccctaagaggcttgtattcttatgatctgatcttacacatgaggaaaacgaggcccagaaaggctcagtaacttgcccaagtcaccgggcagtgagtgagtccctagcagagccaggattccctggtatgcaggagttagcaactaatgtgagttgagcccgataagccgggctgccttagagctttcctctgagatctggctaaatccatgctgagcctgtgcttcttatcggggggtgctaatgggtgaccctctgatgaatgagctccatggctgtgtgttagctctgaccgtctaaagacactgcctatagcaacgaaaaagccatgtcgtggagctgcagggacctcagctacatggtgggggagcgatctgattggcaagagtgaccttccaggagactcacaggcaggtgcctaccctgtgtatggggtccccccattgctctcagaatcccccacccccgacttctccagcagcaaaaacagccgtgtcctgcctccagcctgttgcctgggaaatcaggatgcagggaggcaggcggtggcctggcctaggagtgagtggtggactctggagccaggccatcagtctgctccctgagccatcaccgactccgcagagacaccctaggcgccactgctggagtgggcggcaggagggggcctgagagctgggggtgggggagattaagcagcccaggggatgagagcaaatgctgtgctggagtccccgggctgagtttgaagcctgattctgctgctctgtgaagctgggtttctctgggcctccaattctccatctgtaaaatgggctcatctaacagttaaggatgaacggagatcaaaagactgaaaatcactagtgcttaaaaaagggagattctagagctggaccccctgagcccgtatccctactgaacgatactagatgcatggccttgggaaagttaccgaacttcttggggcctcagtttctcatctataaaatgaacgattacagcatctcagagggttgatgaagggatcaaatgagttaatacgcagaaagtagttgaagggtgcctggcatgtggcaagcactttatcacaagtagtagctattatattattatcctctggaaaggagctgaaggaactgggcattttgtctatcctcaagccctcaatgccaggtaaagagcgggtcattatgtgcttgctgagcaaaagaaggactgttgagggcagatgttggaaggcagagctcaggctgataggcacagatttaaggagacagatgccggctgaatgggaggaagaagagctggacagtggcagaaagtgagcattctgtcgctggagatatacaaacaaaggcctatgaccacttgtgggccagtgcaggggacttagacctcccatgggagagtggggtcggagtgggtggtcttaatggcctttgcagccctgagttgccaagcccctgaccaaatcctggaagatggatttttgcctctttatttgacctccctagggatcgctgagtttgcagtttgagtttctggttcctgggccagccagtgggcaaggaaggctgttagactcaggaaggaaagagctttggagtcactagacctgggttcaaatctctaccatgtgccttacaggtgtgaccttgggtaagcccctttacctctctcagcatctattttctcagttataaaaatgaggatagtaacctcagcttcagagggaaatatgaggattaaaggcaatgaggagtgtgaagaggctggcaaggatgtgaagcacacgtcagagtgtttgagggtgtggattcccatctggattgaaccctggctctgagaaccagctgtgcaacctcagacaggtcacttcacctctctatgcctggtttgcaaaaggggaatgataccatcagtgtttttccaggttggtcctggacctctagagagaactaatccattgagtggagtgaggtgggggtattcggctgcccagaggcctccctgatcctcccacccctgaggcctgcctcccccattcctcctgaggcagctgcaccttctgcactacgatgatggcctcctgagtgtcgctgtctgtggtgaccttgaacacatcgccgccgctgctgctctcgtccttaaggtggtaagtcatgtctgtgttctctcccacgtctgagtcctcagccttcacacgtcccacagccgttccaatgggggctgactcctggatgctgaactggtacatctctgtgggggacacggccatgagcagggatgaaggcagccccttccccagcctctgccagcagtgggggaggggacaagggggcccaggtgagcctctatggaggacagtgcctgaaaggggctctcagcttggccagaatgggggctgggagaggaatgtcccctgcagaagtttgggtggcagtgcaaaaggagggtttaaattctgacctttgggtttattcactggttgatttggtaaaatgcctgcagttctttgggcctcagtttccctacctagccagtgacagggacagaggagcacagtgataaaggctaagactccggagtcagtcctagctgtgtaaccctgagcctcagtttcctcctctgtaaaatggaaataaataacgatggtgccttcctaacagctgtgtgtttatggcaactaacttagatgatgacgcctgtaacatgcttagtacagtgcctggcacttggtagctactcaagaaatagaataaattgtgttaaaatggtggggcttcatagtgattttgctgttgatgttaacggtagttattccttcatttcaatgtatacattgagcacctatgatgcccccagacatcatgcggttctagacactgcggttacagcaacaaataaaatggaccaaaatctcagctctcatgttgctttcctcttaatagaaagggaaagacactaaacaatcacatcagtgaaacatatggtatgtccaatggtgataggtacttaggagagagataaagcagggaaggtgtgggagtgctgatgagggtgttgcgcagttttaaataggctgatctagaaaggccttgcagagaagatgacatttctgcaaaagtcagaaggtggggagggagcgagccaagcagatatttgggaaagagtattctagacagagggagcagcaggtgcaaaggccctgaggtgggtgctgtgcctggcatgttggaagaatggcaagatggctgtgtggctggaggggaggagcagaggggaaaccagaaggaatgagatcagatgggatggaggctgcagcttgctctccaaccagagctgaggtcgaggtgaggatgacttgctaagtgatgggccagcctagctgaagcagggtctgtggggatgtgtctcttgggggctccacaggtcttggtaacccttgcgtggagtggctgcctctgattcatcctcatacagcagccggggtggggcactttctgaaacacgagatgaacatgccactcccctgctttaatcccttttatagctccccattgcccttgggatggagttgtgcaagtcccttggcctgccctacaaaacactgcctggccccttctggcttctccagcctcatcctccaatccccactccatctctagcttcagccttgctgaagttcttgtgattctgcaactgactcactctctctcacctccaggcatcccctctccctgtcctcctctctgcctttgccttcccaattcccgctctgccttctagtctcactgaatgttacctcctccagggaaccttcccagacctccaggctctgctcctgtgctcccttggcccccaagcttatcccattgttagaattactgcgtttttactctcattttctgtttattctctctcttgggtatgagctgctggaagaaagggaccacatctcttattcatcaggcattcccagtgcctggcagaatgccaggctgtcgcataaatgaaatgtgtgagggactagtgagtgtatgaatgaaaaccagcatgagttaccagtagacactcaccagattaacacaaatcaaagaacgtgacagtaccaggagtcagtgaggatgtggtacaatggacatgtgcgtttcctcatgggggaaaacagtttggctttatttggtaaagctaaagatgagtacatcccatgacccagcaatttcactcctctgtatccatagagaacaagtgcaaatgggcacctggagacctggggcaataaggttcaaagcagtctccttcccaatggccccaaactggaaataatgccagtgtccaccacccccagaatagataattatggaatactatacagcaaagaaaatgaataaattacagctaccagcaacataagttcataaacacaattttgagaggtaaaaagcaagacaaaaacaatttgtattgtatgattcatcccatttatataaggttcaaaaatggatgaaattagacttgtgactggtgatgcctgcgtagatgaacagactcaaaagatgaccatcacaaaagcaggtagtggctaactggagggaggagttggggaagaggctatgatcaggaaagggcatattagggcttctggggtcctggctggtggtcataggattgtttgctttataattatttgttgaactgttgtttttgtgtgccatagttcatgataagaaagacggaaagaaaaagaaaggaaggaggaaaggaatgacgagcaggaaagcaaaccttctgggggccctggcctcctctctgctctgccccaccccttccagttcagagctcattcagagcctggcacaagtgggcagaagactgggtgggggtgcgtcccacccatgccacccgtctgcatggggctgccttcaggggctggggctgggctgggagattgggcagtgggatggcttctgtgccaggctccctggcaccgggaagccggttggtgagctcagctcactccgctctgtgtctgagctgaggctgtaggccacaatgatgctgcgctctcagctaagggattggattcccttatctctcgggggtcagtcccctgtggcggggcctaatgtgagagcagcagacctcaagtaatgactcacccgataggaatcagcccagctcctgcggcatttagtccctgccagctttggtggcttccctgtagtggctctcggcctgagcctgggacagaggggttggctgggctgatagggagctgggaggctgggccggagacatcccccaacccccgctgtgccagcagaggcagagggtggaaaggcctcctaattcagaagcacagagtcgcgctacccaggctcagaggaggagggaaatgcctgtcactcagacttagtttttctctgcacaacctctatctgtctgggggctgagctgcctctgcctagatccctgggtgccccctttctccccagtaccttccctctgcaagcctaggtcagcggcatgggatggcccaacaagtggctaggggagtgggcaggggccagtgaggggttggaggatggacggaagggtggatgggtggggctccccctctgccggaagcaagaggaggtctgggaaggtgatggtgtgttacttggctctgtggagcatcggacagccctggggtcttccttggtaggaagcatggttggaggggggctgggggatagctggtggcttgggaggacagacagacagacagaaagagagggggaagcccttcttttggtgggaagtctaaagggaagctggggtcagcaggtggcttggatggggtaacagacagacacacagacgcgccttcctctgggaaggcctcactcactctgcgggaaacggggcgggttgtcattgacgtcggtgactacgatggtgacggtagtggagcccgagaggccacccagctgacccgccatgtctgtggcctggatcaccacctcgtagcgctcctggctctcgcggtcaaggtcaggcacagccgtccggattacgcctgtgggtgagtgagggtgaggccagggcaccccacaccacctgcccactgatgtggagacccctgtacaggcgggattcagaccctgtgactcctgggaaaattaagctcaggaggagagtgggccacacaaggacatccacgtgtccaccatgtgggacagggctcagtgtacaccacacacactcacacacgctcatacagatacagatacacatgcccacacagatatactcacacatgctcacacacacggtcacacagatagactcacatacttgctcatatggatgcagatactcacacatacacacatgatcacacagatgtacacacatgctcatatactcacatacacttctacagatacattcacacaggctcacacagaataacacacacaggtttattcacaggtttattcccagatacattcacacacacacagatacacacagatacattcacacacacagaaacattcacaaactcatacacactcctatagatacactcacaaacacacactcatataccttacagatccagtcacatgctgccactcatacactcacagactcacacagaattacatacaggcctatacagatcacccacacacatacctgcccatgcagaaatgcacatgggctcagatacactcacacatccatacagaaacacacacactcacacctggccatacagatgcactctcacaaataactcatactcacatacacacaaacacacaaacagatacactctcaaatacacactcaatgatccacacacattcacacatactctcaaatacacatcctcccacacaaacacacacagacacactaacatatacacacacactctcatacacactgtaacacatacacacactgaaatacatacactttttttctttttcttttttcttttctttcttttttttttgaaacagaatctcactttgttgcccaggctggagtgcagtggcgcgatctcagctcactgcaacctcctcccgggttcaagcaactctcctgcctcagcctcctgagtagctgggactacaggcatgcaccactatgcctggctaatctttgcatttttagtagagacagggttttgccgtgttggccaagcaggtctcaaactcctagcctcaagtgatccacctgcctcagcctcccaaagtgctgagattacaggtgtgagccactgcacttggtctcaaatacatacactttcaaacacacttgctcacacacattgcacctgcattttctcacacacagacacaacacaaaagcaactgtgtgactcccctgggcaaccagtcccacttttggggcctcagttttcccacttgacattctatgcatgaaccaggcctgtgtcagtaacacacagcccagagccaggcatggagcagcagcttggctggtgtgaactggactcacgtccacactcatgtacactcactatgctgtcacactcacctgtatacacacatgcaacgtagttcacacatttgtggtgtatggacataagaacacatacaaagtcccttacacacatgcacactcatagctaccacctcacattcttattcacaccccctcccacaaccaaattatcccccagccttagaggtgcaccccaaccctctccaggccctagatcctctatccaggcaccagctaatcacggagcagacagtcctccaagctgttattggaagcagggagggcagcaggcgtgggggtgaccgcaagattaattctgctgtggggaagactgggcttcttgtctccctgccagtagaagagacaagggtagggcgggggagtcgatgaggcattcagagcctctcccaccacccactccaacctgccgagcaccaggtggtgacaggtggtgcccggggcctgtgcgccaggtggagtcatgcaccagcagccccatgctgcgccccataaaacccaagctctgacacctgatgtcccccaacagtccccagactcccatacaggcaacagaatggaaggagaggctgtagggcgtgtgtgtatgtgtggtgtttgtgtgtgtatttctgtgtgtacctgtggtaggtagccagaggtggggcacctaaggggtggtcctgctttcgtgggatcacatgcagatatggaatgggtgttctgcctaatcaagggtcacacaaaccatctatcagtggccttctcaacgcctcagtaggccccctcctgaccccttctctaccaccactggtcttcccaggaacaggggagtcttggcagtggattgccttgggatagattccagatctgccatttctttggtcatgtgattttgagctaatcccttcacctctttgaacctcagtttccttatctgtaaaatgggacaaccaccatactgacttaaatgacaggatttctcaaacttggcactgtagtcagtcattttgggcaggataattctctgtagtgtgtgtgtgtgtgacctgtatgttgtaggatatttagtagcatccttggcctcccggcactaaatgccagcagcactaaccgtcgccttagttccaaaactgtctccagacattgtcaaatggaccctggggcaagattggttgagaaccactcgtataggatttcatctcatgagaattacatgtaataaaaacaactaatgtttatgtgcatttgctctgtgtccggcattattctaatcaccttaggtgaattgcctcatttaatcctctcaatattcatatgtggaaggtcctgtgattatacctgttttatagatgaggagacagaggcacggaaaggctaagtaccttgttgaaggtcacacgtgtagaaagtgcatagccaggacgctgaggctttgcagccctggacagcaggggctgtacagggaaggtggggtgtgtcatattctccaccctggggggttggaaagagagaatggaaggcagacagaggggaggaagagagcgaaggtgatggacagggaagaggagagaaagaagaaaaggagtcccagggaaagagagacagggagaaacctagtgagagacaggaggaaagagacagagaggaagggaagaaaggaaggtaggggaggggaagggaggggaacagacagagagggagactgaaagggacagaaaaacagagaagggaagattgcggggggaggtagataaaccagagagaaagccagagatacccagaaagagacagtaagagagaaacagagacctagagagaaacaaagaggaagagaaagaaaggagggaagaaaaatgggcaaagaacaactgagagagcgggaacagacatacagaaaacagagagggagacgcaggaagggtgaagaaagatggtggggggtggggaggggagggcaggtaggcttacagtgcagcagccaccaggccagggagcaggggatcccaggtggaaaggtggagagggagtgactttagccgagcacttgctgtgtgctaagctttgtgctggtcacttgccatccaggacctcagtgaatgtacaggattcgtggtaggatgtggagtcactgtgtatctatgggcttgggcaccaaaggctcagtgtcccagctctgagtgggggctggagcaggggcctggctccacctctgtgagtgagagaggctccacgtggctgccttctttgctgtccctgtcacttccagctcctgaggaactggggacacgacactcttctcacttggaaactggtcctgaagccttgtggtgtgtaggattcaggtgccatctctgggtgtgtgtgagttgggccccctgggccttgttctcgggatccagggaacagggtaggttgctatggtgacagtgcccagtgaaccacaccttccggtatccacgcccttgggtcattccctcccacactgactctggccaatgggacatcagcaagtgtgctttggccaataggacatcagcaagtgtgacaaaagcagaggtttgataagcccctgtatgctgcggcctgtcctcttggaatcctgagaccattgtactgtgaagaagcccaggataaaaggccacatggagagggaggcctagtcctgccagctgtcccagtgaagtcactcccagcgacccgacagctgactgttgctgcatgagtgaccccagcaaaataactgccaagctgacacaccaaattgtgacaaataataaattattgttgctttaagctaccaggttttgggtttttttttttcttttttttttttttttacatagctctagatgactgatagagaaatccagttggctgggccattcctctgctgattttgtctgggcttactcacgcatctgagcctaaaccggaggagcagctgactggaaggtccaagatggctcatttacatgtctggcagttggtcttggctgtcggcggggacacattggttctttcatcctccagtaggctggcttccttacatagcagtctcaggactgtgttccaggacagtaaacgtgaaagctgcaaggtctcttaaggcctaatgtcagaatttgcataacatcacttctgccacattctattggccaaagtagtcccaggcgaacccaggttcaaggggtagggaaacagactccacctcttgcccagaacagtggcaaagtcacattagtaagcagccgtgtgcagggcggggaggaattgataacatattttcctatctactatgttccactccactgtcttcctcctgatgttgggagaagcacggtggagactattgccctctgagagatctaggggtacaaatattccaaaacagtccatgaagttgttcttgaaagcttctggctctttgacttcatccgttcactcattcattcattacagtcttgccgagggcctactacaggtgctggggctgcacagactcagataggctgcaggaggactctggggccagacagatatgggctcaagtcttctttccaccatttacatgctagctgaccatgggcaagttcctgggcctctctgagcctctgtttcctcttatgtgaaatggagacacccacctggtagggctgttgagaggactgaatgagaggaagcttccagcagcaggcctcacattttggagatgccttgctgatctctttcctcaagttctggattgagtacctccataaacaagtttcacagaggcagaaatccatgctggtcttgttcatcccgtgtctatagggcctggcacacagcaagtgctcaaatgacgttttgactggctgactcccagtgcccctccactgcccctctcacagcctgggtgtagctatccatttgcttctctgctggagcagaagctccgtgagggcagaaaccaggtctacttcattatcctgaccccaggatctggcacttagaaggtgctcaacaaatgttagtttcattccctccctgtaaaatggatgactctggctcagttgacaattttcagcagagatcttgaaatctcggagaacatttctattcctgctggggtggtggtgggcgggggctggtaattataacctggcctcagctcccgcagccttgtcttcacccatcgtccccagttccagctgttgtcctggcctcccctgctgtcccctccaaatgctgcaaaaggggccctggagcccgtgtgatgcctcattagcacacaaatgccatccctgtcgcccctgtggggggcctgctggcaggcctggcctttaaaacacacaagttaattcctcctctggcattggggcctcgcggcgccccgcctcctcccttccctcacaccttcctcccaggccccgttccggctctgctccctgctatctgcacagcaagaacagactgtacctcgcagcagctgctaaatatagacccgcatcagcagaatattcctggctggggaactagagctggggctgggaatggcaccagggcagctcttgccatggggctgtgggcaaggggaggcaaaacctggttcttcctgggacgtgccagaaaggaccctttcagattgaagagttgaggggctctggagcagggaccccatttgaactccttcaactgccttgcctggtcctcactttctgacctcttgggaactgttctgctcccccaggcccggtggcctcccagttgtcaccatcttctgggccctctgctgcgggggatgctgtttcttagaaactggctgtccttcccactctcatgtcctccccactctctgatccttcatctgcccagccctgccacctcccaagactcagtcttggcccttctcttatttctatgttctttcttctccccatctccccaaggcttatcaaccctagggtccccacctcctcaggctgaatgcatgaaggcttcctcatcaccatcactatccttttgtgctggggctcaggctgagcactttacatacttcctgttcccttggcctgcagtgttggtccccagaaatctgcatggctcataccttcactgcacttggtctctgccccaaggtcacttccccagaaaggcctgttgtgatttctttctttttctttctttcttttttctttctttctttctttctctttctttttctttccttctttctttctttctttctttctttctttctttctttctttctttctttttctttctttctctttctttctttctctttcctctttctttttctttctttctttctttcctctctttctttttctttctttcttcttcctttcttcctttcttccttccttccttccttccttccttccttccttctttctttcttttctttttgagatggagtcttgctctgtcactcaggctggagtgcagtggtgcgatcttggctcactgcaacctctgcctcctgggttcaggcaattctcctgcctcaacctcccgagtagctgggattacaggcatgtgccaccactcccggctaatttttgtattttagtagagatcgggtttcaccatgttggccaggctggtgtcaaactcctggcctcaagtgatccacccgcttcggcctcccaaagtgttgggattacaggcatgagtcaccatgcctggctgtgaagtcttaatctaagtccttcctctgcattaggtttcgtcctcacactcgtcactgcttgacgttatgttatatgtgtacatgctcatcttctatattctctacttcaataaaagtgccatgaatgcagagccttagatttgcctactgaagcattcctagtgcctagcacagagccaggcacataataggcactcaataaatagtggttgaatgaatgagtgaactgtcccattgaatcctcacgaccatcaagtgagatgggtatgattctctcccctgtgcacatggggaaactgaagctttaagagacccaaccattcttggagctccacacctgtatttcacatggcctgctagaagttctaggtgtttctttccctgttttcgctcatcttaaagccaatatggttaaagctgaattttttagctctgcatcagattccagggcacattcactcattcctctgctctagtagctttcttaatttacactcctcctgtttctgttgatggtaccccttgcctagatgaataaatcctactacatggaaagaaactctgcctcctcccccaacctagtcctgcagattcgtgttggcccccaaggtttgtccttggcaggatctcactgccaccccctattctctcttctcggcatctcaatcaatcctcactatgaattcttcatcatccctggcctcctagctagacaggtaggttaaggagtctgagtgactgtcaagaaagggcgcaggcttttggtttttgccatttgggactctatgctgggcatcctgggctccagggcctccctgcctctaattcctgcctctgagccaagctctgtagcagcagcccaagggatcttgttaaaattaaaaccagagcatgtcatttccttgcttagtagtcatcagtgaacctgcactgtaggtgaggaggaggggaaatggatactctcacacgtggctcacgggagtgtcgtctggtacatttcggcattatctatcgagattccgaatgcatgtgctctttgaccaagcttctccacttcctgaaaattatcctgcagatatactcacacaagcacaaaatgatgtatgtgtgaggttattcactgtagcattgtttgttgtagcaaaagattggaaacagcataagtgtccatcggcaggggactggtgaaataaattttagtgtatccataacacccattaaataagagaaagaggaagccctttatgtactcatatggaataatcttcaaaatgtattgttaagtgaaaaaggcaagccgtgtgtatagtgtgtttatagctaccattcatgtaaaaaaaataaatacatgtaccttattttcttgtacatgtacagaatagctctggaagatgcatgagaaaattacattggttgccttggggatacagactaggtggctgggggactggatggggtgaagaattgctactaaattcctgtttggactttttgaattttgaaccttgagatgtattatctattaaatgtgagttaatattttcgagtgaatgagtctaagatctcataggatgtatacaccaagtggctacctttggggctgcaattactggtgatagggagtgggaagcgtttcttttttttttctttttagcatttctttaatgtttgaatgttttataaaatgtattacttttttggggagaaaaaataatgaagatactttgtgtgagaaaatacaattacaactgtgctcatggattggaatcctctcccttctcccccagacaaaggaaacagacaaacaaaaacccaaaacccaaatccatcaactccccccaaccccacttcccagctttgcccttagaatgaaatccaagctccttagcctggctcacaccagcacagtcaggcccctgccaccctctcgacgtcacctctcaacaaacctgattgccgaagcctgagctgcttacaattcccctcatgccccaggctgttccacttctcccaacttttgcctgagccataccctgtacctggaatgcccttctctgaaatcttggtctggcaacaccttcttcttcttcttcttcttcttcttcttcttcttcttcttcttcttcttcttcttcttctttttttttttgagacagggtcttgctctgttgctcaggctagagtgtgatggtgccatcatagctcactgcagcctcgacctcctgggctcaagcaatcatcccacctcagcctcctgagtagctgggactagaggcacctgtcactatgcctagctaattttttcttttgtagagatgggttctctctgtgttacccaggctggtctcaaactcctgaactcaagcaatcctcccaccttggcctcccaaagtcctgggatcacaggggtgagccactgcacccgcagacactttcttatcctttgtagattgctgctacttcctccgagaagccttgcatcctaatccctacatatctgcctatcctcctgccccacagggctgtgagcctcacaatggcatttgataaacattctgtgctgtctgacatctcattccccgccttcacccaagccaggcccctcctatcccaggagcagtgagagcaccccgctggaattggcagccactcccagctgtgtgacctcaagtgagtcacttcacctctctggtcttcagtcttctcatcctgtcctcctcgcactcccccaaggcttctcagagattagtcaggttctaatgtcaccgtgagtgaagtggggacagcgggtgggcgtgctgcaccatcgtttggtggtgttgaggggataagcaagaaagaagccactcttccttaaaggtctctgtgtcttagacacctttccttaaagatgcttgtgtttttccatcaggtccttaacaactgccatgtgggcagagctctcaaaactgctgaaaccagccgtcctcccttccccaaactacacttgtgaccccggaagagctcaaacgcctgcttcaacttagctccaaggacaagccgcttagttcggacctttaaggtccttttagggcacccacagcggctgcttcctgcctttcggtttctcttccagttttggaagaaccccccaccccattccttttctgttcctcagtccgtccatcttcctgcctggctgcccctccctctccgcgaccctggactctcctgctgtgcacaaggtgccccctgtgctgtcctcagagcttctgggacagaaggctcagagcagacgtctggggtggtcctcgtcccgccccgcccctggccccgccccacggctccgcctctggccccgccctgcccctcaccggtcttggggtccacggtgaagtggtgctcgccgtccagcacgctgtacaccagccgagcgctgctgccgtacgtggggtcatccgcatccgaggccatcacctgcatcaccgacgtgcctgggcccgggggaccaagcgagacaggggtcatctggggctgcggagctcgttcccccacttcgcctcaccccagggaagctgggagaggagaccctcgggagacctgcgggaggccatcgaatacagcccctcacggtccccatccccactctgagccccaaccctcttcctgttttgaggcctttctggtggcgcaagtgtgaccatggagtcagatctggattcaagtccccttggggtggttcccagctgtaggactctggcaacgaaaggcagcctctctgagtctgtttcctcttcagcaaagtgaggcaaatcctagtgcttggttcactaggttgaggggatgaattctaaactcccagcacagagctgttcacagaagtttctcaatgatggcgacaatcattacagtcatcacagtcagttggagccaggactggaaaccaggacctgactctcaacccaggggccattctacccactccagctcctactgattcttcaagggacttctgcctcctctccccgcatgatggtggtaggggacagcccagagggacagaccaattcatcgggggtcagaggccagtgtctcttggcccccggcaggagagggcagcacccagccttccctttggaaagttgttggctgcgggccctggtgccctcctcgcccctccccctgggtgcccagacagcccacccccagacacacacacttctcatgctctgcacgtagactgctggggagagtataaattggataaaagtccatcaaacagtggcaattaagttattgatttttgacgctgcctcattaaaccgggagcttcttttggtctgtcccagagatggctctaatttgacatcatgttcaatttgacgaaagcagggcttgggacgtgaggctagaccaggtgggggtgggggtaagggtgggggagggtcaggtggaggggccaacaaagccattgaatccacccaaacctttccagaaagaagagggtgagctggaagactcaagagtgagtcttgggggttcaggatacgacccaaagggaaggagatggagaccccacctcagagagatgccctctgctgggtgcctgctggtggggccaggcaggcccctcctgggctgggctgggctccctgggccagcagggctgcatgctgggaggtgaggccagttcactgcctggctaatgagtgagaatctggaagtgctactgcagcaattctgctaagcccagcccgccgcccgcctctcccgcctccagcctggggccctcgatcattccagacagacacatgtatttatttttcactcttttgcatttctcatttccctctccaggttccccctcccagccacagtctcctaaaacgtccctgcaatgcgcctctctctttggccactccagctccatgtcaaccatgtcagagttgaccagagaagctgaggaagagggatgggcaagccccttccctccagatgctggtgcccaggggtctcctactcagggaggacacagctccaggtgcctcttgctggactggaattatgtcctattgagcactcatgacacactggcttcaccagccacttaaatccatcatctctaatcctcatagcatctcggagatgcagagtggcccccccccccaattttacagctgaggaatcaagtcagacaggggaaaagatttcactgagggcacagagtgaggaagtggtggaatttgaacccgggactctgggatgccaagtcccttctgggaagcagtatcagcacaagtacagtgactttggggacagtggtctggtgtactgagtcacaaccagcgatggcactgccacttattagaagtttgaccttggatctgtcatgaaccgctttgtgcttcaatctccccattttgtgaaatgagggtggtagtattacagatctcctgagatcattttgagaattcaatttccacgtccagcaccaaggacagtgcctgaaccatgccaagaacccaataagtgcaggttgttgttgtcaactcaagaggcacagcacaccagtatacaatggcacaattatgcctccctcacagaggtgctgaaatgggagaagatacataaagcatcaggcttatggtgggtgcacaatatctagtggctgttgtaattgttatgagagagggtctccctgtcactcccctggcaagtccctcccactccctgggcaaagcacaatgcagggctgagtgactccccagagacatggctgagctctctctctccctggctgcatcccagggactcccgaggggatgatggaaccatttccccaatccaggattctttattgcagccattatagttaatgccgacatgtgggaatggtaaagggtcagtgattcaccactggtttcccaggccccagaggaatggcttccttgggccacacaccccctcccaccttcttcagaagtcagcagctccccagaattggctgacaaaagggtgccaggcttgtagctactgtgggaccaccttggggtggtcccacaggttcagcagtttatatttcacagtgccgcatcatgtccattctctcctgcagacttcacaccagctctgtgatatagacgcagtggtttgttggtgagtcagctctgaggggtggatgggtcgggaggagtgccctgctttgtaatgtttgctgatttccatggtgtaaatattctctccatggcccagtttcaagctaccaacatgatatcaactggcccacaaaactcctgaaaatcaacatgtggctctcgtgagctggtacgagctgactccagcacacccctgcaccatccccatttcacagctgaggagactgctatgcacagtgaagggtgaaaacatgaattaataatgaaatccattatgaattatgtaacattattcaataactgataaagatagcttccatttattaaataacaactttgtactagatactatgatataagccctttttgtatatgatagaatttacaaaacagggccttcagataagcttttaatattttcactttaaagaggaggaaatggaggctgagtgaagttaagtaatgaacctcttagtgcttccatttcctcattagtgagatgggtaagaatactaccaaactcgtggatcactgtgagaactcagatttctatgctcagcaccaaggacagtaccttgacaagctcacctggtgcaggagagaggcaggtttcaaacccacgtggatctgatgtcaaagcccacatatatcctgccttagagggaggaggaggggctgcttggagtagaagtagataggtgagacagagagagggaggactcagacacaggagcaggggggcagaggaggggaaggacaggagctgggtttagattctccctcccctacagctggtccaagcccagacttccagaagtagagctgggactggttgacaggagcgggctgctgtccgtggtgctgctgcccagcccttctgctaagtggtggttaagggcctaggtccaggctggaatgggaagggttgcccaactgattcttggctaaacaggatctcagggcccatggatccatgtggaatgttagatatggaatggcttgtccttgaagagcacagaaatcagagcttctcaacttggcagcacgttagaatctcttgggagctttaaataacattgatgtggagccccatccctgaccaattaaataggactcttggggaggagcccaggcaaaggtattttcacagtctccagagtgcatctaaagtgtctctcggtctaaaaactgatgccctagactgaatccctcactgaactgatgaggaaattgagtcacagaggggctcgatgacttccccagggacacatcattagtaagcagtagggaaagattcaaactcaggtctgcctagccagcatgctgccctcctggactcattgagcctgttctgagactgacacctgaaggaagcaggtaggataatgttgccaccaagtcattagagctcttcccagctgaagtcagcatgagaagtcggacactcttcagaggagatgccctcgcatctccatggagactgggtgggctttggcatcacagagtcctgtggtttcaggtcctaccacttcctcactctgcaccctcagtcagatcttttaccctttctgatccatttcctcacctgtaacattaaggggtgcccattctgagcctctgagctgctatgaggattagaaatgatggatttaaggacccagtgtgtcgtgggtgcctaacagaagctcattcctttcccttctctccgtatcatcaggaggcacctggggctgtgcctccctgagtagaagacccctggacaccagcatcaggagggagggggcttgcctactcctcatctctgtgttgttctgacttggtttgttgtggaacaagaattggaatatgtgtcctggatcccaggccagaattctttttttttcttatcccttaatccttgctatctgtgaagtgcagttgagtctccagactcaagttccagaccccccaggaggagccccccagctggctctgggagtgggtggtgctgcatggagtggagctcagggattacagacatacattctcattccagccctgtccttggctttgtgtggctgtggaaaaacttcccaatctgattgggcctcagttccccttctgtaaaatggagataacactttatcattcctgtctccctgggtgtgggagaccccttaatgagagaaagagatgaagcactttggaaaagaacagagttctcagccgaggtgaccacatgtcattattatgaagacgtttgtaattattatcatcctgcctcttccctacctccttttgccaccccactgggtctggggaaaccctaggctcacatttagcttctcaaacatttataaaaaatgagtcccacccctgctgctgccagcactgtgcagaatgctttctattaaaaattaaaaaccacttgtcgagtctctgggaacgctcagattacacaggaaacaagccccctctcaacatccacccctgctgccctcctcccaactccctcttcgatcatcacttagaatgccagctggctgggctggcctcgaccctgcttctagcctcccagccagggcagcctaatgcagatgaatggcacacaggagatgcaggaaagtggctgcatgggaggaggcaggtccagagacaagtgacagagaaggcagcacagagagaggggtcaagaaagcgggtaagagacagagaaagaagggtcagagggacagaagttcgtggggcagagacagacagaaagcagtagaaacacagaggttaagtaggaaaccagaggaatctagaaacagagacagagcaaatagaacagagacagaggtacatatggagcaggaagagggggcagagcaggaggaggaactaggagaggaaggtgaagtttggcctggtggggtgaggggcctgctgcattgcaccttcctccagagtctccagggaacgtgaaacaccctcccctcctcaccttttctttccttatggatcccggccatggacttgcccatccaggcgacccctgactgtgtgtgtgtggatctgctatgtcctcctgagagagagcactctcttatatcccaaatagacccacaagcgcttctgtcctctcaacatttaccaggccctctgttatgcaatctagtgactttgtttgtttcggactgcaacatttgaagtatctgtgatagcatccttctactcatggcagaaagcaaacatttttgcttatgattcaattccattcattctctcaacatctacagagcacctactatgtgctagaccctcgagggcaggatggtagctttatcatctttgcaccctaatgccatgtggccacagggcctggcatacagagagtgctcatatttgttggatgatttgttgatggaaaagacaaaaagagacagggatatattcctccctgtccagattacccgggccatggggccaactcctgaggaccagggcctcggctcctgtctgctgcttctccccaccagaagcctcctgtcccgttccccccagcacgggtggtgagagccagtgccgttgctaggcaaggagatattgcacgtatagatcttcctggactttaattaaaaacatctttagaagttgtctctgcagagaccagcgattgattcctggcttgggcctgcgggctgctgagctacactctctccagctacagacgggacaattggaggctcccagcctgctgctgccctctccaaatgatatccttggggaacacactccttcctgccttcctcctttcctctctgttcccccaagcaccgaatttaagaatcagatagtgtgctctcccagttttactttccttcccctcttgagcctcagtttccatagctgtaaaatggggatgtcagtacttaacccaagagagtccccaggaggctgaaatgatattagggatgtgaaagtgattttcaagctgtgaagttttgtgcaagaaatgattgtgactctttcctcaaagaaagctatggatgccgagccaaggaactcaggttctggtttccgcttctgggtctagttctggcttcagctcttactgtggaagctcagaaaaatcactttgcatttattttttcattagtaacatgaagacactaatactgatcctgcttattcctcaggattgtgagaataaagggaaatagctctgtgaaagcagtgcttgctgatagctcttatttagtgaatatcccaagaagtgcaggctgtactaccaagacagtcttttcccatctattaaatatgctgctcacagaggaattgaaacacatggaaaagtgcccgtttccacattctgttgagccccaatcccatggtctggcaatgtcaattctatggcatgtgcgctatgacattctccttcctttgcccatggcagacattactaatccatcatggcattttttctaccaaggctgaatgagatcttagactccttctcaatacagcccaacagtcactaccaattgatctgagttagcacaagagacgaaactgatctgctaccactttgaggtcaggggtggtgtcttgctcatctgtgatctctacatacctagcaaagtgctatgcacatagtaggcctaatatgtgtttattgaattaaaagcaactacttctctgtcctctgtggggctatatataaagtaggtgctaataaatgtttgctaagttgggtgactcatctttgcaagccctacagagccaagtacattggaggccttgtgtataatgggtgctaataaacatttgtggatttaattcaattacttatctttgcatcctctgcagtgcccagaataaagtagtggttaataaatgcacattgaattgaatttctcatttctgtcttcagtaacttcaatagtgccaggcatagtgtcttgcacaagattggcatgaataagtaggaggagttgagctgggtgtgggagacctgtgaaatcctcttgccatcccattcaggttgtgacagcctagggaaggggtgtggctccctgacattgaaagaatgtctagtccaattcttctctatcaaaacttactccctgttgatgtatgcagcatcaagctgtaaattccctctctctgctgctgacttccaaagttgtatctttagcctcatctctcttctgacatctagactcatagatccaactgtccccttgacatatgaacttggatgttcagtagacacctcaatcttaacttgcccaagaattaattcttaatttgttctgcaaacttgctcttcctggagcagtccccatctcagccgcagtagctccatccattcagttgctcaggcccaaaacttcagcatcgtccttgtctcctctgcctcttactccccacaaccaatccctcacaaaccctgttggctctaccttcaatgcacatccagaattccatcttgtctcaccatccacactggtccaagtcaccatcacctcttgctgcactattgcaattgcttcctcattggcctccctactcccaaccttgcctcctacagtctattttcaacatggtggacaacaagtcgttcttttaaaatataagctggattagattaaacctctgctctccatctcactcagagtacaaccaaaaacctttcaatggctaccaagtcctgtgtgatccattgtctgaggtaatcagactccagatattctcccactcactcacttctcttcagccacagacctccgtgctattcctcaaacacgacaaacatgctatgcctcaggacccttgcatttgctgttctctctgcctggaacattcttcttgtagcttagtggttgtccaagtatggtctccatgccagcagcattagggagtttgttagaaatgcagacatttctaacagcccagacctcgtgagccagaaacgctgggggggacaagggcagcaatttgtgttttaacaagccctccaggtaatgtggatgcaccaaagagtttgaaaaccactgtttcacagagctccttggttcccttccttcagatctttattcagatgtcctcctccagaaagacaggacttccctgacccctctatctaaaataacactccccgcaaattgctcctaattcctttattctgcatagcactcacaccatcaggcatattaatattcattttatatatctatataaatatatagatatatatttaattatatataatatataatatatttatatataaatatataaatataaaaataaatatatattatatataaatataatatataatatattatatatagatatatattaatatctatatttgtatatatttatatattaatatctatctatctatctatctatctatctatctatatatacatagagagagagagagagagaaagagagtcttgcactgtcactcaggctggagtgcagtggcatgatctctgctcacggcaatctctgcctccccagttcaagcaattcttctgcctcagcctcccgagtagctgggactacaggtgtatgccaccatacctggctaatttttttcgtattttagtagagacggggtttcaccatgttgcccagctggtctcgaactcctgagctcaggcaattcaccggccttggcctcccaaagtgcgaggattacaggcatgggccaccgcacctggcctattttatatttttaattatttatttggatattatacatttgcttgtctctgtcctgactctccctgctatagtatgtaggtttcctaagaatccccaatgcctgaaacagtgcctggcacatagcaggcactcaataaacatctgatgcttgaatgaaccctctcaatgctcagaagggaacttggggtccagagggggcaggaagtcgaccaaggtcctgcagggaaccaggcgtcctgactatcaactcagggcccacttggctgcatcaggcttaacatgactggtgtgcccctgctcagaagcgtggctcatcggaggccccccggcacacttcccttcccttttaagctgtgagtggtttaatttgcaagcgctgctgcctttcatgtcccaagctgcgtccctgctccctctgatctccgaagctgcccagaccctggtgctgcttgtcggccccgccctccacagccggatcaggaggctcagtaattgtgactgattttcaaagctgcctggagtctctgcaagcaccatggtgtcagatttgcttccccttcaaatagttgctcaaatgaaataaactaatttaatttctgcttctcccttccccctccttggttcccagctggttcaaattgagtcccccccactcccgacatttttcctgagtggactgtgagagtcagtgggctgggagagggagtcaagacagagctgggtctccataggccagtggtcataaactgggggctgcctctgcctcctactctctgcatgaccttggatgagtccttgcccttctcttggtctcagtttccccacctgtgaaacaaggacccttgccattccaacaacctgggagccacgcccagcaacttgctctgtcactgacttgctatgtaggtactttcttctctctgagcctcagtgttcccatctgctcaatggggatgctaccattagtcctgccacctctcagagtcacagtgagagtgaagtggtcatggaggagccaccatggtggagatgaggctgctcttcccctggcacctccccatcctcagcccttctccacagtgcagcagagggaattttccaaaatgcaagtcttcccatgtcactccctcagttaggcctttcccaggctacctgctttcctctagtccttcagatggggctcctgcttccttctctagcatcagctctccccacctttctggactttttaatgcagaaatgtgcaggtcagttttaagtgaagggagacagggctgtgagtttaagtcagtaggtaggggctgccggacctagaaagtcagggacttgctgtgtgaccttggacatgtcactgtctctctgagccccagtttacccattagcaaaattgtatgctaagttcttgccaggctctgaaattccatatgtctttgccattgataatatccaaatttatctctccagcccagacctcctctgaacctggatattcaactctcttgttcaagatctccactcagcagcataatacgtttttctaacttaacaaacttcacgccaaactcctaatttcctctcatcccccaaatctgttccttcaatctcagtaaatggaaatccatctatttaattgctcaggttacaatcctaacagtcatccttgagttttctttctttcacactccatatccaatccattagcaaatgctttcagctctacttctaggatatatccaaaaggcaacctcttttcaacacctccactggtaccatcttgttccaagccaccatcacttcctgttcacaggccacctgcttctgctcttgccctcttttctgcccatctattcttcatgaaagagccatggggtcctgatcatgtcatttttctgagcaagaccttccattgacttctcagcttgttcagcataaaaggcaacgccctggctatggtctacatggctgcatgatctggtcaccttgtttcttctcagcagaattcaactgcagggcctttgcatgtgccattccctccgcctggaatgctcttccccccagggcccatgctctcacttcctccaggtcttcagagaagccttactggaccaatgatctagttgttcacttgcttattgtctgtcttccttaggaagaatgggccctccatgagaggagggaatcttctgccttttcactgctgtgttcccagggcctagcatgtagtatgcactcaataaatatttgttgaatgaatgaatatactcatatagacacagcatgtcacatgcacacacaggccttaaagtgcttcttggttaggtgtttgtgtgtgcacatctgcatatatatgtggaacacacatgtacatcaggcatgcatgcatgcattcctgtgtgtgtacaccagtctgcactcacatccacagccccactgttccctatttccccctcatcccttgcccaccattctctctggttcacctcctccccttcccctactggctacttgctcattatcccagcaagctgccagatttggcccaatttggggaagctgggctgacagcaccctctcccaggagctcaagcactcctggcctctgacacgcagccatagagctggaaggtccagagaggtacagcatccaacttttggccacagcgagtcagcaatggagcgtggcttaggacctagggcagctgcttcttgtctagcctggcttgcagattacttggagtaacgtggtaggaaggagatggcagctattggcttgtgcccctcaccccatgactcccgtttctaccagagccccaggagccctgagctaagtggggccttgatggtcagaaacggtctgggggtttcctggtgggagaaggcagagtcatgcagctttagcctcagtgtcctgctgctgtgtgcatggccctttctgagtatggttgtgtctgatgtctacacagagatgtatatttctgtgtgtgtgcacttcactttctatgggcataatcatgtgtgcagtgctcctgggtgtgtgcagtcatacccaggtaagtgcaactgaatctgtgtctgggggcttagccatctctgtgtgaggctctgtccctagctggctggatctcggtgagctgtggcttcctctgggctgtagacagagctgcctgtctcattcatctgcctgtgcccatgcctgtctgcggctgcacaccaggggagctggaccccaggatgctcatgtctgcttgtggcttttgcctctgtctctgtacatggctgagtctgtgcagaagcactatctgcgtaagggcctgtttcctgcctggggttgtgtgtggctaggtcagggtgtgaggtcgtgggtctgagtgtgtggttgggccctgtttcagctgtgtcccaatctagctgttcctagtggtgggtgtgcctgaagatgggactatgtctgtgtggaggttgttgccaagggctgcgctgtgtctatgtgcagttgaacttttgtgaagggctctgtcaaggcgtccagctgtgctgtgtgtgtgactctgtccagctgtgcctgtgtaggggactggatctatgaatgaggttgtgtaccagtgtagtggtgagttgtatgcggggctgggcttgtgcatgtggcatgtccagatctgcagctgtgtctccatacgtgactgggtgtggctgtatgagcatgtccgagggcatcactgtgtccacatgcgggtccacgttcatggggggctgtgtccatggatgtggctgaagtcatgtgtgtggttttgtccaggactatgcttgaccccagggggcacctgagctcacatctgtaccctgtaccctaggtcagcaggctctgtcttttctgtccctccccagaggatcagctactccccttcccagcaggctccacttggggatcaccttgatcccatcccccacccccagggcccacagcccacctgtaggtgagagctcggccacgctgccaatataggggccgtgcaggaagcggggctcactgtcattgatgtcctgcaccttgatgatgaactccgactcgggctccagtaggcggttggtggcgcgatcccgagcctgggcccgcagcgtgtagaaggttttctgctcgcggtccaggcgctccatggcatgaatgtcgcctgtcagctcgtcgatcaggaagatggtcccagcaccctcgcctgagatggtgtacttgatggccccgtcaccctcgtctgagtcggagtggatctgggtaggcagagaagaaggcaaggtggaggctgagaaggaagctcctcttggcctcactgtctcatgccattggctgcctattcctaagcccatctcttctccagcacatacacatctttagtgaggacactgaggcccagcagccacgctcacttccatccctggcctggagtctttcctcagcccgctggggccctccctgcccctggactctgctttcccctctgcattcagagctatcagccttggaggcagatctgaacatggcctccctgcttacaaccctccagtggcttcccattgccttcacaaagaagtccagcaccacctccacacctctctcccctttagcacgcacagctctgaggcttctgccttgagccctgtccttgtttctctgcccatggaaagtctctcatcctgcaaagtgcaacaaaaatgccacctctttcagaaagcttttctggatcctcagtctccccctgcccccaggatctctcggtacatcaagccatcatgatcatgttcagccttgtaggatggctgtagccagcacttctcaaactctagtatgcatgcagttcacctggggatcttgttaaaatgcagattctgactcagtaggtctggggccaggcctcagactttgcatttctaacaaacttccaggctgctggtccatgacctcactgtgaattacaggtccactgctccctagactctgcaccccaggagattggggtggcatcttcctcattttggtatatggagaaccaggctcaagacatagcacatgacagggagtgaagggagagaggaggaagggatgttaactgaaagagcaccttccatgtgccaggcactggctaagcaatttatgtacttttctagttaaagatgctttttttaaaaacctgctagagtaggtttttctatctttattttacagatttttttcccacttcctaatgaagattggagaagtgggatgggttcttcaaggtcaggccactggaagagctggtctgactccacactgggctttcccattccatctaaagcctccggagaggagcccaggggaagggagagacagtgcagcctggcccagccttggctctgacatcgcctccctgtgcatcctcacccatcactttgcctctctggccctcagttgcttcatctgtaacatgggaatcatattagcattttcctcccagaggtactgaggggtttgctgagttgagaatccatacaaggcccttagcaggtgccaccaagtgacatttacaatatttagcagccagcacggtgggggcactgcccaggcagtggtactgcagcaggatccctgctgggccaggcaggaacccttcagttgctggatcacagagaggcccagggggctgagagagttggggcgagggagaggagagggactatttactgcaggtatggaggtttttcatgattttaacaacaagtacaactgtaccagtttgtactacctggaaataagccctgtctgagacataataagtgcccaacagatggtagctatcgttattattatattattactgcatgttagctatatataaccaggatttaatctaggcactattaggctccagattccaggctgttttcactgccctgagatctcttgggtgaggaaccagcaagacgtctgttttcttgcaatcagaaacacctaagtccttatcttccaatgcccaaatctcccaggcagcttcaagcagaggaaaatccattccgatgaggctttgggcaggtccctgctcctctctaagcttccatggagatggagtgtggacaagagaatccctaaagttcctttcaggctggggtgctggggaccccagcccactaggcaggagaacaggtgcccatgaagtcatcacgaagagggacgaaagcccatcccctgccacgcaggaggagccggggtataaattctgctggtagaactttgtgtctgaaaggtggattatagaagtgccatttggaagattgaatggcccataaacattttcatatttcattagccgattaatgggcatctctctctttttggcgagtctgctgattctcagcagaaattgcggggactaaatggaggcgtctggtggaaactttccgggtccccatcctgttatagattgccccaattaatgcccgtcctgggctccactgagaagccttcttcctgtccagttactgttaatagatttctcataagtggctggattgtaaaaacctcataactcagtttaatgcccccaataaaattatttcaggacatcggccctgaatcattggcagtgctgaggatgaggagacctgtctctcctgtttgctgtttatacgttttttccaccattgccccaggggagatgggatgagagggggtgattctgttcccttttggggtgcctctacctgcttcccagcctgatctgttgtctgcttatttcatcagcaaacacttctgagcagtgtggtagaatagatgccatttgaagagatgcttaacagctataatcttactagtcttcatcattgccctgtgaaacattatcattcccatttctcaggttagaaaactgaggcacagagaggggaagtcatgtgctgtgtcacatggctaagtgtggaaagcacgcttctgactctaccactcactaatgttgggaccatggatttgtgaattttacctctctgagcccctgtgtttccacctgagaaatcacaccaagccctacttggcacaggtgtggggaggattagatgagagcatgtttacattgacctaagcactctgttaatggttgtttccttccctttccatctcctgggtctccatcatgtccctgcaggccttgatgttttgactcagaccccaggcagggctcacttacgagtgaggaatggagaggagcgagtagaacctagtggtgatgtcatcttctgtggaatatgacacagagctcacgctggggcctactggctgctctctggggactgcagagtcagacaggggcaatctgcctgggcgggagctaagatctgggagttacgaattcaggcccagctggggttgcctgccctgcctgcctgggtcccggctccagagtgaagagggagtgcctctggctctgccctaggaagatatttctcaggactctcagctgcgagtggaggctggaagatggtgctctcatttattgagaacctactatgtgtcagacatgtgttgcaggccatctgcagaaatccaacttgactttgtggggtttgtaaatgtatccctattttccaggtgaagagactgagatggcccccggtctgtttgactccaaagcccagtttggtttctctgcagtctctgggaatctggctagtctgcttacaatgcctatagcagagggtgagggagaaaaggggaaggggggaaggagtgggttactgggtggccactgggctgcacagcttgggtggtggccttgacaccagtcttttgccctgtgccgtgcaggccacagtcatcggtggcctcttctctctaagcctccattttaccacttgggaaagaacctcaaactacaaatcaggaaagattatgtgctttggagtcagaagcagctctgtaccagcttcagctttgccagcaacctgtgcatgaccctgggcaagtggctacccttctctgagcctcagttttctcatctgtaaatgggactgatattgcttcaccacatatattctgaagattcataagataatatatggaagctccttgcgcttagtaggtgctcaatatagattagttccctctccttttcctgtcccaatctcaggaggggtcgaggggtcacctaattcatcccctatctcctgatacaagaaccacacagactcaaatcctgacccactggagatccaggggccatgatccaatcaatgccttcttgtctttcaaactcagcttgtttcctcctccaggcagccctctcagatgccctctcatttggttgaagagacctcacctgctccgttcctgccccgtacacatgcccctctactccacaccctcctctaacttctagtgttgcacatctgtgtccccagctgtcatgggcctcaaggtatggactaagttaggtttgtctctgtcagaactctctgtgcctggcacacactaggtaccctgacaatgcctgcagagaaaatacagggggtgggaaagttgaatatgtgtgtgtgtgtgagtgcacgtgagtgtgagcttgcaagctccttgagggccaagcatctggctgtttattccatctccccagcacccagcacggggcacagcaccaaacatattgaataaatgaataataaaatatacaacagtcatcagactcccccagttgtcttctaggatttctggaggattcagccactcttaaatcccaggtacagatggacagtcgctgggaacctgaaacactccaggcacagttctagaccttttactgctgtctcattgatgtctcatcttgtgcatcagagcttactctctccccgtcgtgtagatgggcaaactgaggcccagagagagtctaaaccccacctaaagtcacacaggtaatgagagacggccccaaagcctgacaccacattcagaattctttctaccacatcaagtgtggccagccctggaggagaaatccccctcaagccccatcccttgatcataaacaacatgaaaaacacaagagcgatgttttctcatcccagggggctgaaaaatgggatttatgaagccattaattacttcctcctaattaaatcaaaattaaatgtgagcataggtacgttttccttattaaagacaattaaacggacagtgcggctacgcaaataaaatgagtccaggatttaaacggaaagcaaatcaaataaaaagcctccccgggatgaggggtctgttcacgactgtgctactcgtaaaccaggagttcatcaattttctttaaatattagcaacttaattaaatctgctctcctccccactttaatcctgccgtatatctaaaatagatctcaccacctacaggagttggtcatgagtgctgaccccataattctatctttttttaaaaaattaaaaatcctacaaaatccacatccagctgacagaggcctcgggggaaattatagttcggaaaacggattagtcagagtacccagattttatggaaatgctgggaggttgctttgagggtgggtgtcgtgagaaggttcggggagaggtgggccagggttgccaatgggggcagggccgcggaaggagctgtttgtgtggggccttggcgacaaccgcggggcccagcggttcctgtgggtgctgacaggagcctggcggtgagtgatggaggaggcggttgtaaaataggttaccgtcgggcgcccggggttcactctgcggatggtgctgttgctaagctacctttagaattcgacaaggacggatgctccgagcggctccctggggtggggggaaccaggaagcagtgaattaactgaaaccgtggtgaagtcctttcttcctgaagagtgagagagcgtggtatgagagtgtgtgtttgcattcatatgtgcccacacaagcactcgtacatacgagggactcagctggaaaggggacaggtggcttttaaaagcccaagctcatattcctagggttggggggtggggtgggctaatgacaaccttcccccccacttagtggtaagaaactatactgttaggttgccaaaaagactttttgggatttggggcgggagttcacagttagatggtacactcaagatggtggaactatccataatagtgagacttacaaggtgagacttaacaacataaaagtgaatacttactgagcacgtgccaggacccagagagtattctaggttcttgacaaatgctaactcactgactccccaacgccagactttgagctaggtcccagtaatagcctcacttaacagataaggaaactgaggcacagagagggtaaaaaagttggccctctgtatccgtgggttctgcatcagtgaatgcagccaacccaggatcaaaaacattcagaaacaaaattgggtctgtactgaatgtgtacagacgtttttcttgtcattctccaaacaatatagtataacaactacttgcatagtatttacactgtattaggtattatcaatactctagagatgatttaaagtatatgggaggatgtgcataggttatcggcaaatgttatgctattttatattgggttttggtatccatgggaggtcctggaaccaatcccccatcgagagatactgagggacaactgtaatgtgcccaaagtcaggaagatcataagcagccgagctgggatttgagcccacgcagtacagctccaggtggccctttaaccacacacaatgccacctctcttaagaaagtgtacattgggcaaatatttgctaagagatggaaacttcttctccctccctggatggagtgtttttctggaggtggccttgagagtaagagagcagggcaggggctctgggtgaaggtgatagagaaggagggtgacaagtcacaacagcagtggcaatgtggggactggttgctgggggaaacagaaagggccctgggcccagcacagtgcttggctcctggcagctgcttaatatgaggctcttgaagtgagcacggagattgtgttaggagacctggtttcttgggttggttctgcaactatgttgctgtgtagacttggcatgatcttctctgcctctgggcctcagtttcccctccttctaatgaagggagctacagggccctcccctgcttatagactgtggttccatgagatggggatggggtcagctcatgctgttgaggtgataaaggctaggtaggggcagatgaaggcgtgagtcagcagccggttttctcatcttttcaggatgtgggtggctggcgaggcttttgcagagccccagctgctgggcagacagcaaggctgaagtgcctgggatgaccacctcctctgacatttaggcagatgcatcagtccttccctgtctccagggttttcctggaccaaaggtcttttcccaggtctgggaatctctgaggggtctggaaaatcaggctggggttgacctcttctctttctcttttgggggcttaaaaacttcagctcaggggaacaggtgtagtggctgacttctgtaatcccagcactttgggaggctgaggcaggtggatcacttgaggtcaggagttcaaagccagactggccaacatggtgaaacctcatctctactaaaaatacaaaaattagctgggcatggtgtaatcccagctacttgggaagctgaggcaggagaatcgcttgaacctggccgaggaggttgctgtgaactgagatcgtgtcaccgcactccagcctgggtgggcaacagagcaagactctgtctcaaaaaacaaaaacaaaaccaacaacaacaacaacaaacactttaactcacacaggttcaactcttggccatgccactcgcccactctatgactttgccctctgttactttggtttctttacctacaaaagggaatgatgatttctaccttgcagtttaagggttaagtactttatatgggaataataaaaaacagcaacaacaaacaaacaagccacaggctgaacactttatgtgctctgttttcttctttaatcttcaacaaccttaggaagctggctctctgagcccctgtttttacagatgaagagactgagtgttggggcagtaaagtaacttgttcaaggtcactcagtgaagggattggcagaaccaggcctcaaactcaggtgtgtctgcctccaaagccttcattcttagctgtttcaccattggctactacctatcatatagcaggcttggtcactccatccccagcccttgccccattctaccagcgtcaccatctcccacacctgtctgggagtcaggagtcctaggccctgccactaggttgctggatgatcttgagcaaggccttgaacctatctgagccctgtctgtcaaatccttgctcagcttaattgtgggaatcattcattcattcattcattcagccacatgtatggagctttgggccaggtattactgtgtctagaccagagaaaatctgagcttcctgcaaggcaaacccaaaggtttacatctagattttccttctctccttgtcaaggatcctgatctctgagcctcagaactgcctcccggttcccacactcatttaagcacacaggaagctctggagttttctttccccacccacattgctgaccaagacttcctggaaagctaattggccctaacaaaagccagatactgtcccggggcaccaccccactttcatgccctacaatcaccctccacttcaacaccttaactgctgacaaggctctgagcaaaccagctaccttcaggtttccaagtctttgattaggttacgtcctctttcccaccagcctgatgaactcctacacgtatgtcaaaacccagttcaggtgttttctcctccatgaagccagacaaaatatactatttaatgattgcctactcagtgcctggtgctgactcatgaagcttttcatgcaccagggtgcctctgccactctggggatccccaaagtggcagaggctggatctcactcaccttttctccccagcatcacacatgggccccacaaggggctcaggaattgaatggatgaataaaagtccttctcagctccttatatgcctatgttatagatcttcagccagatttaccagcatttactcagagagtttgagaaagtagtttcattcattcattcattcattcacttaataaaccgtttgcaagcaatgtctgtgctaggcactggggatttcgcggcgagcaaaacaaacatggtctaatagaaaagacacacattaattgcacaatgaaacaaacacatgcataattaaagtgttatgaaggaaagatgctgggacctcacgggggatgtgacagcagatctgtcctagcctggtgtgggcaagaagggtttctctgagaaagtggcattggagctgtagtgtgagtgtaaggtcatcagtggaaggagcaggaaagggcagttcagcaggagaaacaacttaggcaaaggggcagtggcaggagtgtgcatgggacgttgactttcagaagagcaacggaagggcagtgaggctgaaactcagagactgtggcaggagatgaggctggaggagccagatctttgtagtcaatggatagaatctgggctagaccccagtgcatagggagctgctgaagaattttaagcagagtggagcagctagagtatgtgtgtgagatgatcggatttgcaaactcgttcctaaatcccacatgcatctagctacaggatggaatgggattgcctgctgggctctttctaagatgcaaaagggaggggaaggagaggagggcatggggcggagtgggagtgggaatggggctctgggcccccttatcagtccttggctagggagcagaagaggcacatgaaacatggatttaaaagggcaggtgaacaagggtttcttgtatctacccgtgggtgtccccagggtcctgggatctggagttggagtggggccccactttaccttgcccacatacaggggctccgtgcccgtgtactcctctaccacgaagaactggttccacacccagccgcgtttgacgcggccggctcccagcgcgccgtcctgccgagctccgggcgccgacggcgagggtgtgcccgctgcccacaggcgccccagcagcgtcggcggcggcggcagcagcagcagcagcagtagcgcgggggacagcgcgactcccgcccggagccccctaccttcgggcctcggcctcatccttggcctgcgcggggctggggcccaggagcatggacgagaggcaccagggcgccgctgcttggtcgcacaacgatgcggcgccgtgtcacatggtggcctcagcgcggccgccgggatgtcgcccccgacggggcacccggacgggcccgcggccctgaacgccgcccagccgcgggggtacccggctggagggggagggggcgcggccgcatccggggcatggacagcccccggggtgcccgcccgcgcccccgtcgccgcgtcgcgtgcggatcaccaggcagcacctggacagctccagagtcggggaagcgccatggttcctgcgcagaaaggatgcgggttggggccggcagatcctgccaggactaggggccttccctttccatcaggagcctgcaagagaaacaagaaaacattagaggggcttctgtgtagggggagggcaagttgagtctatctttcctcttgtaggtactaattaaacacctgctgtgtgcctggtactgtgcagggtgggacaggcatcatagcaactcacagtggtcccctcttcttggagcccatagtctagtaggcgccctctcccgcacatcgcagcctctcctttcacctggcatcatacgccctgtactcccaatctcctacgcctttctcacagcccctgccccgctcagccctcatgcccacacaaggagagaccctagtaggcggtgcccctgacctggctgacaatctctccagccctgcccagcccccagaaatcccccaccctaggtgcttctagaaggcatcttcaagagcccccaagacccaggcctccttggtgcacagaagtccagcacccagcccaccaccaaatatgcctgccttcctatccatcgcagcacagacaggtcattccatctgaaacaggcaccaagggaaggccctctgatgtgctcgtacccccacaccagcttctagggatacagcacctgagtcccagagggcctggcttggagacaccctcagtgactccgggcagggtcacaacccctctgagcttgcctctggtgcctccacattcccccagaaaatatttctttcccagagtccgagagacatctttcctccccactcttggaccagcctgccgtccccagatccatccatctctcttcccttctctctatcagatcctgctttcagcaggaaaggatctgagggactaacgcctactcaagccataagatgaataatggcttaatgtgggtgtttacaggggacagcgatgctgcttaatggaggaatttcaggcacagagaggagtgtgtggaggtgaggggctcaatccccacttctccttctcctgatcccagttcagctcagttcaacagctcagttccaccaagcttcaactttgtgccaggtttggccagttgccaggggcaaggtaaataagctcacagtttagtggggtggaaggtgaaacccttcttataacaacctaaatgctaggtggcatatgatcggggctataaaagtgtctgtgtggacaacctgagacctgtggggctcagggaagggactgagctcgggtgtttggaaagggaaagtaggcgggagacaatcagggttacttcttggaggaggcggcatctgagcagatgggaagaaagggatgggcatttcaggcagaggagtgtgcatggtggctgagtggtctggccagtttggggagttagattgtgagcaggggtgtgtgtttgggcagatggtgtgtagtgggttggggtgggaggctgacctggccctagccagatcttcctgagaacaaagaaagtggcctaactctagggaggaagaaacgcagaccaccttctttaacccagcatcacagtgggcaatgcccttccctttaactcacgggaatcacaactctgaaaattgtcttatgcctattttgcagatgcctaattccccagtgcttttttttctagcatctcctccggaaaatctttatggaaggagtttcagggtggggagtcattgctggaaggtgagggtgacggtgaaggggttaagctgtagttctgggcaatgagagtgggaaaacgtccacactccatagggagggatggagggaggggtctggaacacgctgttccctctttccctataggtccaagcctgaactcatggggtcaggaggacccatgatcctgtggtgaacataccctgcctggtatgacttctatgggcctgggcacgaggcttcccaaccctggcagccctgctccgcaagccctgctctgtgctgccacctccagggatccggctttgattccctgcattatgacctgggctggtcgtaatgagactggagttatgggtgaggaggaggtgcagctccaaagccttcatttcctggagcgtatggcttccctgcgtgccccatgggaactgttcccccaactccaacaagcagctccagggcccatcacagccctgcagggatgcagaggaggggagaggctgaagggagagagaatttggagggaggctgctgtcacttctggagagggctgtggaggtcgatggagtggcatgtcaaggggagatctgccagtgttcacgggcaccaagctgttgctctccttccctcctttcctttatttctttgtttctaacacctttgacaaggatgggaggcaagagatccattcattcagtcaccaaacatgagggtctgctacaagcagggagacagaacagcgttttatcctttcactcattcatttattgaacatacgttaacaatcgctttctgtttaagacagcaagatgcaatcagttattcagcgatctatcagcaaagagatgcatttcttcttgttattccttcactctttccacaaatgtttaccagcacctctcttatgccagtccatgtgctgggcactggggacatagcaataaaaaaatgaagtactggccgagtgaggtggcttgtgcctgtaatcccagcattttgggaggccgaggcaggtggatcactttaggtcaggagttcgagaccagccaggtaaacatagtgaaaccccatctctactaaaaatacaaaaattagccaggcatggtggtgggtgcctgtaatcccagctactcaggaggctcagacaggaaaatcacttgaacctgggaggtggaggttgtagtgagccaagaccatgccactgccctctagcctgggtgacaaagtgaaattccatctcaaaaaaaaaaaaaaaaaaaaaattgaagtcctggccctcatggaactgactttctggtgggggacacagataatagaggaattaatctacagtataatttcagggagtggtaaacattgagaagaaaagtaaagaaggacgaagtggagggagaatgatggaaggaatggagtgagtgcgttgttaaagatatggtatcagggagggagggcctctcagaggaggtggcattgggctgagtctggaaggatgagaaggagctgtgcacaaaatagttccacacagagggaacagcatgcaaaggtccagaggttggaatgagctgagatggcatttgcagctaaagtgcaggatgcatctggacatgtggaatttggggtgttggggaggagaaggcacgcttgttgtagaagggctgtccaaggcaaaggcctggagtcagatcccaactttatatatttttaaaattttatttatttatttttgagacggaatttctttctgtcacccaggctggagtgcagtggcgtgatttcggctccctgcaacctccgcctccccggctcaagcagttctcctgcctcagcctccaaagtagctgggattacaggtgcatgtcaccacacctggctaattttttaatttttagtacagatggggtttcacaggctgttcttgaactcctgacctcaggtgatccacccacctcggcctcccaaagtgctgggattacagatgtgagccaccgtgcctggccaagatccccactttacagagggggaaagtagagcccaggaggactctaccaagcatacatcatgacaaagcagtgcctcaaacgtgggacttggactcctcaggcataaggcatctttggggaatgggaaaaaatgcacctctaggtgaatgcaacccagtgtcggagtcacaactggcagggcaagcctgccccgccttgtgagggcacaatctgtactactgtttgagggtggagccctggccctcccatcctcacctctccctccccttcctggcccttcatacctcagcctacaggtcctccctcaggcatcttggctaggtgccctggcagcctgccaactcttcactgctctgcacagccctgctagggctgccacagacatgtcggcctcctccctcccttcctcccttcttccttttcctgctccagctgcttttcctgaatggatggtgactacagaaccctgtcctggcattcaaaattggtccagggaggcagctgtggagtcctgcagctgcattcagctctcctgggaccgcctcccatgagacctggggcacgttggtggccttccctggtcctcaggtctcagcctactgcacagagctgtttaatcccaaatgggattaaaaactgagcccaggcctggctcaataaatgttggctctgccctgtccacacttcagcctcacctcctataatctgtccgtctgcccatgggcctacatatatgcctatggcttctgtgtgcgtgcgaacatgtgtctgcagtcacatatgtgactgagtgtgcatgacgatctgatatgcattccttcatttcacaaatatttatgagtttccactctgtgttgttctaggcacagcaaaaagaaacaggtagagtccttgccaggtgggggcacagacaataaacaaataacgtgtcagacaatggcaagtgcagtggagagagcaaagcagagtaaggggcaggaagttctggggatggcgggatttgctgtttatccatctatcatcgttattacaaatactcatttaaacagggtagccagggaaggccttgtcattaagatgagatttaaacagagatctgaagtgagggacagaggggttgtgcacaaagctgggagaagagggtttcaagctgaggcaacagcaggtgcaaagtccctgaggtcagcagcatgtgtctagtgggaaggaggaacatcgggggtctcgtgttgctgaagtggagtgagtgcaggggaagcagcagcagatgaggtcagagagtgtgggggtggagtcagagcctacaggctctcttgggatttttctgtgagtgagatgagacccctaagagggtttgagcagaagagtgacatgatctgacttatgttttaaaagatcattccgggctgggtgcagtggttcatgcctgtaatctcagcagtttgggaggctgaggcaggaagattccttgaggccaggggttcaagagcagcctgggcaacatatcaagatcctgtctctacaaaaaactatttaaaaaaattagccaggaatggtggcatgtgcctgtagtcccagctacttgggagactgaggcagaaggattgcttgagcccaggacttcaaggctgcagtgagctatgatcacaccattaacactccagtctaggtgacagagtgagaccctgtctctaaaagaaaaaaaaaaaaaggccaggcatggtggctcatacctgtaatcctagcactttgggaggctgaggcagctggatcatttgagcccaggagttcaagaccagcctggggaacatggcaaaaccctgtctctacaaaaaaatagaaaaattagctgggtgtgctggcatgtgcctgtagtcccagctactcaggagtctgaggtggaaaaggatcacctgagcttggggaggtcgaggctgcaatgagacatgatcacaccagcctgggtgacagtgaggccttgtctcaagaaaaaaaaaaaaaatcatgctggctattgtgttaagatagtcagaagctggggttgggaggagcctatggcaatatttcaataattcggcagaggactagtcaggggctttgatcaagggggagcagcggagatgctgaaaagtgaggctgggccacagaatatgttgatgggtcagaaatggggttcaagggaagacagcaactgagtgtgaccatgccctcagcctgggcagcggcaatgatggcgtttcctttcattcagagctgaagacggcaggaagagcagatttggggggtgatcaggaactgaccttgatgtgttacaatcagtttttggacaggttaaaccccgaaagcctgttaggcataaagcagagatacggagcaggctcctgtacctatggctaggagttcaggggtgaggtcctgctgcaggtagcaatttgggaatttgagtggcatgtaaagctgagactgggtgagagcaccagggagtgactgttgatggagaagagatctggggactaaatgctgggggaccacagctacagtgatccaggagatgaggaggaaacagcaagagactgacagagagaaggggaggaaaagggagatatcctgggagccaacagaagaaagtgctgtagggagggagtggtgaactgtgccgaatgctgccattgaggggtaagtgtctgtccaactttgcctgggacagctccacggcataactgttaataatgttcccccagtttggatgataaatcatgtgatcctactgataggtcagatgtggactttgacttgaccattggagttagtggggcggaggtcattagtgaccttgctggcagtgacttggtggagtagtgggtgcacacacatgactggaacaggttcaagagaactgggaggagggaaggtggggacatgtgtgggtgggcgatggtccctcttgggatttgtgaaggttcatttgcctgttgcccccaccccccaaccgcatcccagtagagatggctcaagactgaggctcaggacacaaatcagcatccacacaatgccaccagggcagcttcagctgtgtggggagggccagaagagcctccttctccctgcaccccctcctctactcttcccatctctcctgccgcagggcccggccagactcatccccatgtgcccagactgtgacggagccaacaccatttgcctgggacccctgtgggccctaagccccctagcaggacaggtgagtctctgtccttgcccaggctcctgtgacctggcagatccttgctgctcctgcctagggctgggtttctctagtgggtatgggaagaggagagcagccccaaccctgggtgtgccccctgcctcccagctccccagcagcctcgggaagagtcccatagctccagtttctggcagtcaccgagcacctgctgtgctctgggtcctgttgaggctctgtcactctgtgggacacacacaggaggcaggcacgatgtgagaaatattcacaacttgaggcagcatagacaccaaccacactgactgcagggtcccaggggccaagaagaggggaggtccaggagatccctgtggtaggggctagggtgacagggttgggtggtcttcagggggtttgggacagcggctatttaccaatagcgatgaagcatttccatacacattacagccacactacgtgtacttgactcttctctgccttggaaataggccagatgtggtccctgttcttaaggcagtcacagcctagggtagagacatccattccttaattcattccacaaactcttacagaacattccctaatgagccagacagaccgttaggtactcttgagatgatggaaacctaaagacataattctcccaaagagctcaccatctagagggtggcaacagccattcagcatttacagtgcacctcacatgtaccattttctcatttatccattcaatgaacacttattgaactactaggtaccaagttctgtgctgggtccctggcaagtttcacaaataagccttaacaggtttgtggccaaattaccagattctaatgagagaaatccctggcagttgctcatttatcagtgaaccaaaatctagtgaagacctactatgtgccacaccacctgtaagtgctctgcaaattaaatgcacatgctcgcagatgagcaggagagaccaatattttttaaacccaaacaaaaaaatcccacaacaaaaaataaaacctggaaaatggaaagtgtaggaaactcatgcaagatgtgaaggctcagaggaagagctcctatctccttgagtaaccatggagggctgcctggaggaggggggcattggagctgatccttgaaaggtgaggaggatttgaacacagggagatgaagtaggaaattactggaagaacaagcatgagcagaggaaacctaggacatgaatgggatacagtgaatagtgtagtctggctgggttttatggtgtataaaaagagtgatggttggcaccaaagttatcaaaagaaaaaagaacaaaaatgaaatgagaaaaaaaagagttatgggaaatacaaaggacatggctggctgcaaacagccaattcatcccccatccttctttcttgtttctatttcatttcaacatttgccttcagcttggccatgtgctcagcccctcctctgttaatagtgactagtctaaaccaataggagccagactcctctccctaccagtaattgatttagaaagtattatgtgacacaattctggtcagtgaaatataaaaatatatcttctgtgagcttctgggaaatttttattattcttaaaaaagagatgccttaaggaggacctttttgttttctgcatgtggaaataggtgatggctggtacaatagcagccacttttggttgatgaagggaacaacaccaagaggccaaagaggcctactaagaaaagacagaacaatctgtgtccttggagatgttgtggaactactgaattaagccactctaggtcttgaatccacttccagcctctacttcctccagactctctttctcttttctctgaactccctcaggcctgtctggctgggtctccctttggggtttgctgtcagctgcatggcaaacttccgaaggacaaagacctcacctactccttcttccatccctttccccgttcccacacacatacctggcagagctaagtacagaactggggcctgggagggactcaggagaggcttgctccagacagacttcagaggctggttgggtaatatgaccttccctctcactggggagttgccagctgtgggcatcactgctgctgcttgcacttccggagtctggctggatggccagcatgtcctttcttgatttctcaatgctctggcaacatcactgccaaggctgtatgactgccagcttggtggctccaggctctcccttgtcatctggctttcccctgtcatctggctttccgcctatggacaggggaaggtattcttatcctacctgtcatgggatttctgtcctctcactctgccaagaccaagaagtggggctgcacagagcgacccccagacagaacaaagtagaacagattttgtggagctgcctggggcttctgcacccctgcctcctcccccaaattcctgataatccttttaacattcaggggacctaagaccatgagatccaaagtcagaccagagtttgagttccagttccattattttactgtatgtatgaccttggtaatttgcttcctttctctgagcctcagttttctcatctgaaaaatggggataatagtatttacctcccagggccaacataaggtgtaaatgagatgaggcatgtgaaggaatctgtggtgtttggcaacaaatgttagtgaatgtcatcagaatgactagtgttgttattattatttctggtccctggacaaatactactggaccctattatgcacaaagtatcctggccaggcgaggagagtttagagatcttcatccactcagccatttatttattcagtcatgtatttatttaacaactgtgctaatcaggcctatagtgcagcctgagtcaagaagagtgaagagttgcacagggtatgggagttgcctcctgctccagcgccagactcaggctaggggaaagggtagttcaggaagaggcagctcattcatctgttcattcctttactcactcacttctcccggcacacctggcttgtatgtgtcctctctccatgcttgcctggcttccagggctgccagtgggagcggtgcctgacagtctggctcctgtctgcccccactgagtcccagcggcactgtgcctgctggatcctgagcccagagctctctgtgcttggctgccatcttctccctgggggaaaattatttctaccagctcagtgctctccttttgggccagaatagctcccggtgtaatgcaggagctattgaggcatggaggggtgctgggaagagccactttgtctctgctcacctctcattgcctcctacccctaggtataaggcacgatggagccacaaatgaaggaggcaaccagttactgccttagcgtgcctgcaactcacatgagcatgtgtgtggctgaacacatgcatgcatgtgcatcactgatgtgtgcaggggtggcatacacacgcaccacatcccggcaccaaggacagctccctacacatactaggtgctcaataagtgtggagcgagagactaaatgggtgtctactcttcgtgtgctgagcccaagggctgtttctggggcctgggagtgatgcacgtgtagtgttgggacagagggtgtttgcatctctgagtgtatttgtgtgtgtgtgtgttgagggggtggggggtggtggagtgggggcaggatatgccaaagcttctgggcttggtagctgaacatcacccaggaaggcaaaggtggaaggtcaggggagaggggatgatcagagctggggtcttatgtaccccatatacacagtcacctcatctgcaaaggctgacctggggcccccagtcttgccccccgccccaggctatatgtcgaacatgctgccgcacaggtcttcatgaagcctggctcagtctggatggttttcctgttccaaaccttccttgctccctttcccctttaagataaagcccagactcaggcctagcgttcattcattactgtttagagtaacaaaaggtttttcatgctcaataactccacacacagccttttgaggtgaatactgttatttgcctccatttttcagataaggaaactgagacacaaagagtttatgtgatgggcccaaggtcacacaactgatatgttgtggagtctggatttgaactctgatctgccagctccaaagcctgcacctttagccactacccacgtggcccactcaacgccctgcctgattgggacctgcctactctccatcttgccactgcctcttttcttcctgggcagatggaaccacctgctgttaatgacattcatgcctctgggcctttgctcctgctcttgcctctgccaacaatgcccttctcccttgctgtcccacgtccagctctgactcaatgttcagcgcccagccccactgccctttcctccatgtggtctctcagcctcctcccctgaccctggagagctcacacttatctgagcctgtgtctcagaaccaagctcttctttgtcctggcctcagcattctgcccactggctgtgggtgcttcattcttgctctctgtccttcagctcacacttcagtgctgtgatcagagtttgcactactgaatgtgtgagtgaatccatgaagggatatgtggatggatggatgaatggatgaacggaaggacacatgatggggttgcctggttactgctgtaccccatccctcagactgctcttctatgcttgttccacttatggattcatcaaatatttattgagcacctactatgtgccaggctaagtatgcagcagttagaaagtcagacaaagtccctgtccccatggccttccattctgtgtgtgtgtgtgtgtgtgtgcgtgtgtgtgcatgtgtgtgtgtgaagcaggggagatacatttactcatccaacaacctcacaaataaatgcacaattaccaactgtgccaaggtctgcaaagagaaagtacaaggagcccccacatttataggggacactacctcattagggatgggtggggcaagttagggaacagttccctgagaaggggttttttagctgaaacccaaaggatgagtgagatgtactgaggcacaggtggcagaatgtgcagagccatatttaggggaccgaaaggccaggggaagagcagagtgtgaggggagaagctagggaaacagctgaggacgggcctggaggagttgagattttgactcaaccagaaggcactgaagagcttttggcggaggagatgtgttcaaggttgtgtcttaaaagaggtcactgtgcttgttgctggaagaacaactgtggatgtacaaggctggaactggggacccgtgagaaggtggtggcagcatctgaggaagagggtggtggtggctcggaccagggaggctggcgtgggatggagaaaaggtaacagatttggaatatttaggaagcaaaatggatcagagttggtgatgaatcagatgtagcggacgagggagggagagacatcaagagtgactccccggattttatttttgttttagctgacgttttttgatcacctactaagagccaggcactgttctagcactttatgtgcattagcttatttattcctcacaataaccccataaagtaagttatcattatccccttcacaatctcacttcactccaatgagaaggctaggcaaagggacacagtggaatgtgtcccaagctttgttcctttggggaacaaccttggcagatcacaggcacagggaaggaagaaagagaggccagttgcataccttgagctgattctgagtcagtgagaataatgatagataacatttatagcgcttttactatgtgccaggcatggtgccatccaattagctaataataagaggtaacactgagttccatgcagggcactttatatcaatgatctgattgaatcctcacaatagctgtctttaaaatttctattacagaatcaggaacagtggctcagagaggttgagggacttgcccaaggtcacacagctagttagtggaggatctggaattcaaacaggctctggcagtgggagggaaatgaggatgggccgggaggtgctcagtggctgctggaaaggacaggcctgcgtttggctctcagcatgaaccatgtccttcccccacgctacttgacgtgacttaacccaggcctgagtccctccttaaggcctgacctcccgtgcaaattatgaacatgtatgagtatgcacacacacacacacaccatgcacacacacacaccgtgcacacacacacaccgtgcgcacacacacacaccgtgcgcgcacacacaccgtgcgcacacacacataccgtgtacacatgcagactccttggctagcactgctcacctgcccaggggcaacctgttagaaccctccacctcaggtgcccctggcctgcacctgtctccctgccctgcccccaccctgcccgtgtgccggtgccaccggcagagccgtgctgtacatcatgttgacagtagaaattacatcccgagctgctgttttacaccgcgccctgtcagaactcactgcagcccagtgatcaggacaaattgaataccatcctggccgtgtcaatatttattccattttacaaacgcgtccggatgggggcagggccctgccatggtgccagccaagcagagtcccaggaggcccttctccctccaaaccgcctcctccttgctcttttcccctcttcctcctcctctttctctacttttcataattaattaaaattgtacaattcagccttgataatgaaagctgcacaaatcatacatgcatagtttaacgaaaagtcataaaatgaacccatgaatccacactttgagcaaaatactgaaaatagccccctcctcagaagctcctactgtgtgtcccattcttgaacataacccattggttccttctgtcctggcttttatgactagttccttgcatttccttattgtttgtctcccaactatgcatttctgaccatcttagtttagtcttgcttgtttttgagcttgtatatcatactgaatggtcttttgcatcttgcttctttttctcagcattatgtttgtgagattcgtctttgttcttgcatgtgttccttttcactgctgcatagtactccattgcatgaatataccgtgacttagaaatccattcatccattctcctttttcttcttctttccccttttctcccacttttccttcccttccaccttcttctcttcttcttcctacttctcttcctgttccacctcctggttgcctgccccctgttgttctattgttttgtctgctacatctgggagctgtgcacacattcacacagatacacacacacacacacacacacacacattgatcccagctcctccatcctactgaactactgggggcccagatgccccctctgggtctctctctctctctctccctacccagattttgggtatgtggctccagccagagggaggctctctgtggacctgagtctattaaagtttatctgttttagaggattcctggggcagagactgggggaatggtacagcagggtcctttgtcctcacacatcctgtctctactgtagcagccttggggagaaggcctctcttcccactctcacctactctgggctggggtgggaactgaggtggccccaggtggccttatggctgtccgtaggatgcacagctgtgcagggagagaggactgggacctgggtcattcaggggccaagcctcagcctcagctctgctcattgaaggtcttgtggagcacccgtcctgtgcctagcattgtgtctcaccaaggcagagaaggacctgcaggctggtgtgtgtctggggcctcctaggagccattacagagcaggtttggagaccccaggagcatgtgtgacacatttcattccagtctcccttagccccttctctgtcttggagctgctttgatgatgcacatattcgggatagttaatttttattgtaacctgagcagatgacattaaagaatctgtccctttgtggtacgggagaaagctctctaggctggacggcaagtggagtaggttggagcttggctttgatcccataacactgggtgaccttgggcaagtccctgccctggacttctatacaatggaaggtcaaactgcagttctcagggctcatcagaggacagggtcatgccggtgtatagcaaggtgaggcttgttcaaaatctcattgccaggcctctggagccccagattcagtaaggatgataatagtactaacaggaaggtctatagggtgcttttttttttttttgcctttttccacatgttctaatagggtgctttctatgtgccagagactgtgcctttgatgagcaaaaagaagaggctgtactttttgaccactctgctaagcacactccataggttatcttgcttcatctgtgccacatctgttttattataattgttatattacagataaagaaactggagcaccgagaggtgaagtcacttgtccaagattacagccaggaagtgggagaagccaggacttgaactaggaaagtctggtgccagagcctgtcctcagtctgggatagcttctagcagattctgatgttggcctgagagcctctggagcaggtggtccacaagttgtggaacagagatcaagcatggtacactaactgtgtgcccagccccgagccaactgctacatgttttcacagtgattcaacaaggtatgtgtgaagggctcattcccacacacaaccagtgtgagctcttattgctcttattttaggcaattgtcacaccatcctcctgagatgggctttagtctctccagttaccaatgaacaaagaaaagtgtcaagaagagaggtggcttgctgagaaccacatggctaggggccaactccaaagcagtgagcttccgccccagcatactctgcttccattccctgactcagctctgcagctgaatggcgtctcccaactctcccaacctcagtctttccatctgtgaaatggaggagttggactattgggctgggagcccctgacaccatgtgtgaccttgcatgattttcttcccttcctgcacctcagtctttccatctgtaaaagaagttgccagtatcctactccaatgctacttataaacgctgctttaaaacaaaactcctggtgagggaaggccctaagtccagctccctggaaacaggccttgagccagagctttgcctgcgggaggttcactgggggagagttctcaggaacaccgtggcaggggtgagggaagcaggaccacgtggagggagaagttgaactgtgaagctctctcagcaggggcctcagctgctcccacagggaactctggagctgggatgctccaaatcgagcaaggggccaggcctttgaatccatgtatctaccagatattggacatgggtttctgtcccctcacccgcctaaaggcatgacgtggggtgaggcagctgactttggctgagggctgtcagcagctacagggtcaaaaccgtcctgggtggtatgatccatcacataaaacctgctaaaaactcgggccgacctcagccctggaaacaatagcaggcaagacgtggcctgagcctgggcttatccagctgggcctggccccgctccgagggtctgtcgcttgctgtgatcacagcaggatcagtgccccagatcttgcttaaagcctggcggccaccgcctgcctcgcagctcatctcccgcagctccccgaggtcccagcgattatgccactgaaaattccgctttcatcttgtcaacctcgcagtaaattacaggcctggggaggcgtgggcctcctccttaaacaagattcaattccacttagctgcccccattcccaccccacacacgggttccctccctcccaccaccccgggctcgggatttatggcctctctttgcaggcagctggtaaccatggcaagctccttagggaggcttcaggctggagcctccttagccccagactccagcacggccggccgctttctcctaggatgggagaggggagaggccagagatggcaggaatgggcttcaggggccaaggccgagaggtcatagtaaccccagcaatcatgagaacttcaacactaccacatctgaccctcacaataaccatcatttcccccattatatagatgggcaaactggggccagggagcatgaggtcactgccaaggtcacaaccaaggaagcagttgactctggggctgaggtgtttaagcactctggcatactccttctttccccagctgctgcttttggatgttcaaatctctcttagatctcagcccctgcttacattcccctagtgatggggaaatcactcctctctggcaggcctgttatctctctaacgattagacatagttgccaaataattgatcaggccctgtgacccctcagaagggttattttgacactgactgccctctgtgatctggctgctaactctcttctgcaaactgatctttcatggtttgccaccacagcaggctgcctggggtctccttgctgctcagtgtcccgctctgccccaggtctttcttattcattcccatcctgctccaattaccagccctgtctccattcctatcacagaatatcaaagctggaaatccatgactcctcattttcctgatggagagaggcccagagaggggatgcacttctctagtgcacagggtgaattgacagtgtgggtcccaaatcttccgccaataaaataataaatagtactgagcatagctaacttttgtcaagtgcttgataaccaccattctaagcattcacgaatgtaatccatttacttctcacataaccctatgaggcagatcctatttctattgccatgttgccatggagacaaagtgcagagaagtgacttgtccaagatcacacaggcagtctgacgtcagagccatgctccgaaccaggggctccccacaccgtgcaccctctctccattccacgtggcccgttgtgggtggttgagcagacagaggatgccaagaggagccagcctgccagggacaagtaagggcacctgctctgccagggaaactggcctgttgctttcattcttgggctgggggcctgaggtcagcattctccctgccccaagcctaccccctgcggatttccccatccacctcctcagggacttccagccttgtgacttcttcctactggactgcaaccctggacctctggaggcaggggctgaggtctgattcatctccaaaccccagagcctcacccaggaaccagtatgtagtaggtgctcaaaaaagacttgtttttatccaagggagtcaggtaggcttgctgcagcaggagacatttgaactgatccttgaaggataagtaggggttcgccatatagagcaaaggggaaaggaattccaggcagagggaagaagctgagcaaagtcttggaggaagggctattcagagagcctaggggaagaaagtagaaagggaaggcatagccagcccgagcaccttgctacagggctgggtcttaacttggagataggagcactcattctgacctgatggtgctgggaacagatggggaaggagagagggagagaatatttctcacaggtcctacatccccaggtagggcctgctggggctgcaggctgcagtgcagtttggccaaatcactcaccccagactgtgagcagggccccatctggggtgacagataggcagcactgagccaggcctgagggggcttttactttatcccctctcctgacaagcgatagagctggcagataaggcatcttcttccttaatctccggtctcgggctggaacaagaaaggggggcgagactggcaccttgttcaagcctgaatcctcttcttcctgagtttaaagctatggattctagtcatggattcttcatgggaatcctttctccaggaggcactgcaggtgttgaaggaaatggagttcccatacagggttatactccaggggctctgtgcaggggtggtgagaccctaagtctgtgttcatctttaccccatggatggaacagtctggaactccaaggagaagtccaggctgggagatataaatctgcaattcatcatgtagatgatatttaatgctgatgatatttaaggcaggagctgggttgacttggcagtggaacctgggctggacttccagctttgttgctaccaaatgtgtgacctcaggcaggccacctcatctctctgagcctcagtgccctgttctgtgaaacagggaacaggaatcccaggttcgttgtgaagcttgaatagttgatgaatataaaagtaatcctctggaaagagtcaagtgctgtaaccaagtgaggtttgattattattccccacaggcaagagtggagcagtcatgagagtggaagataatgaatagcagctgctgtttgtggaggctgtaccacctgctgggaccaccctgggctgagcccattgtaaacatccatttatcaaagccccatcacagccctccaaggtaggcactgttattatcccattttatagatgaggaaacacatccatgtccatcctctattcttcctctttgcaacagaggaaatggccctcctcttttctgagcctatgcacaccttcctggaatctgagaaagcttatactatggattctcccttctcctgccttattaccttcagccctctctaagaggtttgtaggcatcagcatttaaacgtgctcaagtagattccatctttaaaaaacaaaaccaagcacatacctccctatactccccaaccccttcccttaatagcaaaacctctcagaaaactgcctgatcatactcactatctcctttactcacctcctactcttctcagcccactgccatctggcttctactcccaacatgcaccgagatggcttactaaggtcaccttgactgccatgttgctaaatcaaatggatgttctccagtctctattttacttggctctcagcagcatttagaatataaaactaaagaactgtgttccctactacctctctaataatgccttctgtaaatcctttgcaggtgtgtccttctctaacccacctgcagactcctcactctttccctgggcaatctcatccatgctgatggtttccattaccatcaatactataatgactcccaagcttagtatcctcagtcctaacctctcctctgaagcccaaggataaacatagagctgctctctcatgcctccacttagatgcctccaaaaaacttcaaactcaacatattcctcttccctaaaactgactcttctctggggttttccatcttcgtgaatgacaccctcatctgtcaagtgttccaggccagaaggctggaagtcatgcttggcatctctcatccctgcacccccaatgggcaatctattaagtctggtccactttaccttctaaataactctctaaattgaccacttcacatcatttccatctccattctaattccgtccagaagtttaagatgactcttaggtttttggtttaacactggatggtggtgtgatacttactacgatggagcaaatttggggaggaagagttggggaggcagcaagagttcctttttggatgtgttatgtttgagatgttcctgagacgtgcatgttgagatgtgtcacagacagtggatgaaacagtctggaactccaaggagaaatccaggctggagatataaatctgtaattcatcagcaagtagatgatatttaatgctgaggaaatgaatgagatcacctggagagagatagagaacaggtccagaagtgagccctggggcacaccaccatcagagatgaaataggggaggagaaggaagcacgatgactgagaagaagctgccagtgaggttggaggccatccaagagactgtcatggaaaccaagagcagaactagaggtcagcatgaggaaagctgttgagaagcaaagtaaactgaggacacagaaatgcctccactagcagagattgttagtatccttgctaagagtgttgatgtctgtcttccctgctgggctgtaagtcccatgaaacaagggatgtcatttgtttgctcacattgtactgccagtgcttagctcattatgcattgttttctggtgtgtctggttatctttgactgcatgttggccattgtacttgaattttattttaaggaataatttaaagcccaggataaaggtatttttttctagtgagcatctgcatatggctgtgggtgttaccattctgtgattaaataaaattaaaggtttgaggttccctggcatacccaagttgtgtggatgaggcttccaatccatgatttaaggctgggtcatctctggttcacccttaccccaagggtgaatcctttggagttccagtttattttggtgagaatctctcacctgattttccaccttgttcaggccatgaacttggatttcaattccccttatgccgtgagatcatcagaaaacaaattcagattttcaaggatcagcaaatgccctctggacaaaagtagtttctatgctctctaagttctctgggcttctgtttttccttcagttttgacctaataattcctggtaattccttacaaagagcttacttgtcagctctgtgatgctttaataagataccttttatattttatttagcattcttagccctttttagctgaagagttggccccaaaaacctagtctcctgtttctaaacacagaaatggctaatccctaggactttagcacagtgcatggcacatcgttatggctcaataaatatttgttgattaaatgaatgaaggaaacccaggtgtccaatgtccctactctttctgatgcatcaaacatcacactcacaggccaagatgctaacagagcgctgtgctcagagctcggtgagctgtccggagaggcagggctgtgagctcagaggagggaaagacccatgtagaatggggagcgacaatggcagggggtatcagataggtgagtgcaaggatggaactgcatcttggcagatgagccaccgggttgtgaaaggactcacaggaagtggacattgtagtaaaggcctgaactcaaggctggaatgtgtgaggaatccaagagctaggagtgggcagagaagcagggaccagccagggaaaggggccaaggaaggccccagggcccagtgtgaatgcagaagccaagttgggctgggacagttccctgcagccactgggaggagggaagagcagggagagaggaggcaacagcttttgttgaaatgcacacatggtaattgctacagaagagtatttcccttagtttaaaacgctttctcctctgcattttccttggtcctagtttcaaaggaattttaattgcaaagaaaattttgtcatctcccttgggggagaggactctgcagcttcgaacagtcatgcctgatgctgattcttctttaaactgggaattttcatgctttggctgcgtggaagctttctggggattgggcagcatggagggaggggtagggatatgacagggctctctgctcctttctggggctgggaaggctgggtttgcagccagggtttccctggcctaggtcctcaacaagggtctttggtgccaacctggacaccacgtgcccaagttatggatgatggttctaatgcctttctccttaaactcagtggatttatttaattaatgatattaatgaaacaattgggcccttagcttccatccttgttccactgtagattattctccacatggcagtcatttggaaaacagtttggtagtttctttaaaagttaaatgtaaatgtactatacgatccagcagtttcattcctaggtgtctacacaagagaaatgaaaacatatgtccacataaaagctcatacgaaaatgttcatagcagcatgattcaacatagccaaaaagcagaaacaaccccaaagcctctcaaccagtgaatggataagcaaatgtggtatatccaaaccagaggagtactattaagcaataaaaaggaatgagctgctgatacctgctataacatggctatacctcaaaaacattatgtgcaatgaaatgagccagatgcaaaaaaaaaaaaaccaaaaatcatatattgtatgcctttgcttataggaaatgtcccgaataggcaactctatagagacagaaagcgaaagaaatggttgcctggtgctggcagtagggatggagattgactgcagatgggcacggaggctctttctggggtgaaaggaatgttctgcaactgcgtggtggttgcacaactctgtaatttacgaaaactcattgaattgtgtgcttacaatgggtgaattttagagcatgtaaattatacctcaataaagcttttggaaaaagtggcccccatttctctcagtacaaaagccagtgtttctataaggctctacatgatccgcccctgtggcccctctcaccctgtccgctccccctctccctgttcctctgctccagccctgctggcctgctgagttttcctttcttggcaggcattctcccacctgattgcctttgcagtagctgttcgccaagtctggatgctcctttccccatatctgtgggcctccctcccttgccatctgactatctttgttcaatgaaaagcaacccgaccactccacctaaaatcacagcccctctccaaggctctgccaactcccctttctctattctttactttccatagctcttatcaccttctaacatattatgcgatttacttatttatgatgcttattttttgtcaccctctctcctccatagcacgtacacttcaaggggataggaatctttgttggttcaattcactgatgtatccttagggcatagaatagtacctggcatggaaaggtgctcaacaaatatttgttgagtggttgaattaataagtgattcaacaaacgttgtctgaacaccctctctgtgccaggagctgagccttcagaagcgcattgaatgagcaaatctctcacccttagatgtcttgcattttagtggtagagaccataggtgaaaaaaaaaaaattaagccagtaatagagggaaaccctcttagccccatcagtaagaaatcacgagtgaaagaaactttacaaaaggctgctatgggagcaggatgagggagggtcttcctggagagtgatctactagataagtagaaattggccaggtgggggtgggaagaagaggggttcaggcccagggaacagcacatatgatggcccagaggtcagggagaaagtgtgtcatcctgtttggggaatttattccagctgaaatatgaactgtgatgggggcagaggagagatgctggtgaggtggttgctggtgccaggctgcagaggactttgggcacatccaaatatgtagcagtgagctcagtggggcacccaccaatcagagaagatgctggccacacacagctggaactctctgactgaatctctgcagagcctgaagccaaaggagagaccctggactttagacatgttggtgatccctgaagcgtttaaacaagggagtgacagtgattagattcaccttttaaaggatcacttcggctgtcaagagcagaacagactggaggggccggagttgcttcagggaggctggataggagactgtttagctagtccggctgggagaattgacagtcgtgggcgattgattggatgtaggtggtcagcaaagagagggataaggaaggatcatggacactaataaccatggccagcatttagtaagcagatatttgtgccaggaagggctacccgagcaccttccaggttctatctcctttaatccacacatcagcaactatactgggaggaaggaactgctggcatccccatcttacagatgaggctccacaaacataagtggtgtatccagcatgcaggtagagtctaatgacgacgttggactttcaggggtgactcacaggttgctggctggggttagcagtggagctatctggggagatgggtgtgggcagggccagagaaagtgagacagttttctgttttccagggaagatgccagatccacagagtgtgagcttctccacctaagtggagatgtcaaatggatggtttattttgcgggtctggaatccaaagaagaaatcaaagctggcaagaagtgaatcaggtcttatcaccacaaagaccccacagggtggctgagatggctggctcaaggcagtgtgaagagtaggaaaaggcccaggccgggtgcagtggcctatgcctgtaatcccagaacttttggaggctgaggggagaggattgcttgagcccaggagtttgagaccagcctaggcgacatagcgagaccctgtctctagtgagactccacctctaaagaaaaaaaaaaaaaaggaaaggcccaggacagccccgagatttaaggggtggcacaagtacaaatcaggctgttagaatggtccctttggggtaactaaacataatatcaagacatatatggtggtgtatgaaccaaacgtttttctagaaggcattagaagatagtgttggcagggtttacctctggagagcagcgggccaggttgggagggcgctgtcacagcctcccttgtcctctctgtggacacagcatgggcttatgcaggtggcacacacaccacgtctatttttgcaaaaaatgaataaggcaataactggttggtaagattttaagtcatttttgtttggcttttttctctatcgttctttgttttaactaataaacgttgttaaccaatgaaggggtaggtgggggaagagatggtgaaggtgagtgaaaaggggtggtcagagaggtgggaggaatagcagaagagagtggggtggaggaaatcagaggggggtgagtttggaggagggcccgccccccactggtccagtgctgataagagaccaagggggaggggccccttgaggtgaggatcagggcgtcctcagtgacagcaccaggaaggccacctgtgacctggtgatggttgtaacgaggagggggcgggcaccagattggagtgggctgagcagtgagtgggagagtgaagcgaagacaacttgataagttgggctttgaagggaaggagggagggggcggtagctggagaggaaggcagggccgagggagggctttcttaaaggagagagttgggtgtgctcagtgctaatgagagggggcgaaagtgtagatccaggcagaaggtagggggcaggaggcgttggccgagacaagaggaaggaaggatcctccgtgatgacaggtgacaaggaggaggaggaggaggagaaggaggaggagcgaaagggtgatcaaggggtgggggccccagggagctgggaacagaacccaggcctctccccctgggctcctaggcactccctctgggggaccaccctccagttctacacttctgggggcagtccccagctttgcttctcgtgctggccaccagcccagcctgggcttgcaggcccttcagctggcctcagggcccaggcagcctcttggttctgtgcatctctggtgcattgcatgaccttcagtgagtcctccccacctctgccccaggcctcagtttctccttaaaggttgtttcagctccaggagactagaactccatggttcaatgccccttccagtcctgcctctgccaccccagccaccaatgtctggattaaggaaaactcaggatgggccttctgacctagagatgacctagacagacacctttcatatcatcagaagggacctgccacttggaattttgtggactttttgttttgtttttattattatctattttttttgagacagggtctcactctggcacccaggctggagttcagtggcaaaatcacagctcactgcagccctgacctcccaggctaagcaatcctcccacctcagcctcccaagtaactaggactacaagtgcgtgccaccacacctggctattaaacaaattttggggggatagagatggggtctcactatgttgcccaggctggtcttgaactcctagcctcaagcaatcctctcgccttggcctcccaaagtattgggattacaggtgtgagccattgcactgggccattttgtggatttctggctctgggtccggaatggcccagttagtttttccagagattcttgctctaaatcttcaagagcagcaggaaagaccactgcttgggggagggggcagatttcggctcaggaaggccaagttctggtccagacactgttccaacccagctatgtggctctaagtgaatcctgtgtctctctgggtggacctcagcggtgtctgccgaaaactggagagaatcttggctcccacgtggttttactgcaagggctgaatgagacaatgcgcacacgctctcctacaacattgcaaaagctcggtatattataactattatcataattaataagccccaccctggtccattaacgctgaaaacgcaaaaaactcatgactcaggagtcagtgtgagagaaatatcagcatgtgtagcaggaggtgtgtacacagatggtcacatggcatggctgatgataaggggaaaaggggaaacatcttacgggtccatcgctaagggagtggacaaataaaatggagtgtattcatctgatggaacacagccacttaaatggagtgaaccagagctatatatgacaacattgatagctttcaaaaacgttgttggagagaaaaaagcaaattgcagagtgatacatcagtatgaatccatttacattaaaaataccacaaaacaatgctagttattttctgtgggtacatataatgtatgctaaagtctaaaaatggtctgcagtgatacatactaagctcatcctaggagctggcgctgaggaagtgggaggggaccagattggaggtggtggggaagggacttcagcttcatcgacagtgccctgatttctaagagaatggattcaggtatttcttataaaattaaaattatttttaaaagaaattaaccactttatttaaataatttctgccctgcctatttcactaaattgtttggaggatcaaattatacgtgcagagagaatgtgtaattcattttctagttgacggagcattttttttaacccatgtgaacttactccatcctcccaacaagactttgagggatggattataatttctgtgctattgaggaggaaaccggggcacagagggctgcagtgatttgtcccaggtcacatacgtgtcatggggacgagttgggagtcacacctggggctgtctggttccacaggctgggcctctttttctgctgcttcaagctctggggtaaaaacaacagcccgggtgcggtagctcacacctgtaatcccagcacattgagaggccgaggtgggcatatcacttgagctcaggtgtttgagaccagcctgatcaatatggcaaaaccccatctctactaaaaatacaagaattagctaggtgtggtggtgtgggcctgtagtcccagctactcgggaggctgaggcaggagaatcgcttgaacctgggaggtggaggttgcagtgagctgagatcgcgccaccgcactccagcctgggcgacagagtgaggctctgaggacaataacaacaacaacaacaccttttaaactgcctgctggccgttgttgtcattaggataatgatggtgggggcagagtcctctgagcaccttctcaggggggctggcagtctccaggcagaagtaccacagtcccatctgaaccggccctaaagacctcagcctatggtctgggggctgccttctctcttgagaccctcactcactgttccctgggaggcagtgtagtgctgaggatagaccttggctattggactcagggagacctggatttgaatgtcagttctgtcacatacagtgaccttgagcaatccacttcctcactctgtaagataagacctagtttgcaggttgctgcgggcaaaatgtgtatggtgggcactcagtgaatgttatgtcctgctctctttccctcttccaagagcttctccaactctgagcaggggcctggataattctaggcagtgtctggcttaaccctgaatgctgtgtgagccacagtgtccaacacaaagtaggttctcaggaaagtctgtgatttggcttcaggaagtttgtggggttaaaggaccaatgacaacaggaaaagtcaccacaatctaactggggtagcagacctactcacaagcaaaggtcttcccaatctcaattgatttctggggtcagctcactggggccatcttgaactctacctttagggcagtagggggccattgaaagtttgatcaagggagtgacatgtctaaatagacttctgaaagaacatgttgtctgtgtggagggtggctttggaagggaagcccagcggtagagagactgcctggaggcagggaggccttgaggaggctgtggtgaacagttcaggtgacagatggggccctgagatcccttctaatcctgtgagatgcctgggggactggaggaggccagggaagagtagagtggctggactggattttgaaagatgctaggattttcttggagattgaaaggaaacctgtgatgtatatgaggacgtgttttgtaaatggaaaaaaatcacatacgcctaccctgatactctcttgtccttgtcgacagcttttcttgggcatataacatcctgcctttgtattcagggagcgttgacacgggtctcaaggaaattcccagctcacctgaatcacttggcagaacaagtttttatgtcaactcacaaactgacccatgtaagccctccaacaaacacagagtgcattatttcgaaggtaggtagccaacaaagggaaatggtcagtttttcttttttcttgtttgtcacagacacatctgtcgacccacacctggcattcaggataatatcacagatgcccagaccttcagattcaagggaaaggcaggaatatggacaggatatgagaaaggagtttacagttcatcataaaaatcacagctcctggcttttgaatgcttactatgtgcggagcacacgcattaattcttatatcaatgtctgatgcgggtgctactattacagatgccttttacagatgacagaatgcagagcttagggaatgaaagtatcttaccgaaattcacacagctggcagagcaggagctggatctaaggtccactatgacagctttctcctatcactagacttgaatacgaataccttcctttttgtccccaaagataccgatactgatgagtctgatgatcatgcttcatttattcattgaaaaaataattattgagtgcctgcaccatggttggcaaagagggaagagaatggtggtagaacaggatagacaaagatccagagacagaaatgaatacaacgtgcccaggataccctgagtttggcaggttagattccacagtagatttgcccggggggtgggagcagcactggggagaaaggggtctctacacacagtgggtggagatgcatggggccaagtgccctgagagagcaggaaggagtctcgcttccttatttattacctctgggctctcaaatgcatgactactaggcagaagtgacaaaataaaaagggaaaggaaaaaatgccagctacagccagaataaaatcagggcaaatagaataaaacctgacagccaagtgtaaataaatattcgtaaaagagttaaaggacagattaaaataaaaacaccaaatgcaattcttaccccttgacaaatgcagtgcgaattgggttcttttaatcaaatgtttggcaggtgtatgaattatttataattcaatatcgggtggttaaatggaaaatggaagatgttcccgtcgtcttctcagagcttatccgcctcccccagtgagttctcccccgggggagggaagggtgggtgggtgattgcccctcccccataccaggtgcaggcctggacgctggaacccgtaatccctgcctaattctgggcgtcaccatttgtcaacttgctccctcgtcacaagcctccttgctgctcagagctttgttcaggaaggcgggctcttcaaagctagggacaggagtgggagcagctggccaggtctaggggagcctggagtccagagacccaggttcatggcccagggcttccacagactctgtgcagctctcgcctcttcctggccctcctccactgccatcctttgcttccacatcctttcatttttgtttacagcatgcagtacggcatggggtgccccccacatccagttatggcaagaagcataactgtctccattttacagaggagatgcctggatgtacctctggtcacacaagtggtgcaagctcgagttggggttggaacctatgtcttcagcctccaagtgcactgggaatgcattctgggagcagggggaggtctggagtctgagtagagtggacaggacatgagctccagaattacacagactcagattccgattccagctgcgtgacctgggacacgttccctaacatctctggtcttccactttcccatccgtacactgcagtaatgataggaactgcccccggggctatggtgaggatgaagagggggtggaatcactatgcgatgcctgccctccatggaagctggatattgctgtcattaccgtagttacaagaaatgaccctcattttacagatgagaaaactgaggcctgcagtcacagagacttccccatagtcattcagtgagtcagcggcagggaatccagacctctaggagcttggcagaccatgtgtgtctggctcatgccagcacctccccaggtatccacccacccctgattctgagttggatgtctaccctccccacccccaccgccatcaccaaagagtcccagagagcagcttcacatggagtcccgggcctttctgcacttttctgctccccaatccatttctctgtttctgtctcacacacacacatatgcacacacaccacacgcatacacacaccccgtgagccaaagcaggagcggaggatcccaccacagccaaatgttgcctgacttccctgagcagcagatgaatgagtcctcacagctaacaaacggctgtcggaaaggtgggagaatgaaggtaattagtccccttaatgccgacttcagactaatctttcacacttaaggaaattgttccaatgattttcttattttcaggggagctcgttaagtaagaattagaaaaatagatatggcaggagataagaaaatggattttgtagtgacaagctgcctatacacaccgagagggggctggctggcccgggtctgacgcacagacccagatcttcctggagtgcatgacaggaaggtgtgccagagtccctgggcaggacaaagaccaccagggggacaaaggtgatcagtgaaccctgattgcagttcgtctttgcacccagaccatcgttctcagcctccctgctcctaagccctggctggaagaagcggttcacaactttcctcaacatctggaaagaatgatgtctttgcagggacccactgcagaaaattcagacctcaacaccttctgggatctttgggggaagccaaggaacatttattgaatccctgctgtatgcaagctgctgtgctggctgctttctctccatttcacctgacagccccaggaggtagatgtacagaggtggaggtgcagactcagaggtggggccgatgttcagctagccctgtcagttgttttcaactgtcacctgttctgattgatcagtgagtatgctggtccagtggctcagtatttttaatatttctctttgtcatgtgagccaaggccacagggctgtagattcccatctgaaactggaacccatggtgtctgacaccaaagcacgccatttctgtccctccaggccgcctctgtgtaaggagtcccagtgggaaggaggcatggaggggatgacttggagccaggagaaactgtctcctgccgagatagtgcagctttactaggtgggaaaatgggagggaaagtctgaaaggtgtttgtccttctgggatgggcacagatcatttttccctcactcctcatcagcactcattcctgcctctccatctctgctcaggctttcccccgacccccaacctgaccactgtacccagtgctgatcactcctggtcttcattcatccccaacagccccagacttctctttcgcccctgtacctggtggggactcattggttcccatgtttagctgcattctgggaagcttgcctttgcatgtgccgtgaccatccggtctgtggaccaggttgcagcattgttagcagaactgcctggtgattggctctgccaaaggagaattgttctcgaacaggccaaatgggaaaacgagactttgtgaaaatgtcaacatgacatttttcctgggtcacaggccaagtctcccccactcccccaccacaatgtagacctctgctgtgcagaatttgtgtgtttggagaaagcccctagtgcagtgcttctcaaccaggggggaccttgcgacccttgggacatttgcaacgtctggagacatcttcgcttgtcacaactgagaggctgctactggcatctagtgggtggagggcaggaatgttgctaaacattccaaagtgcccaggacaccttccccccaaacacccatacacaaaataattatcaaacctaagatatcagtagtgctgatgttaagaaactgccctgcggtcatctgatccaacgttccctttaagcaacttacctcagagttggggatagaatccaggtctcctgactgtttctaccactgagattaaatgatggaaagggaattggacctctgaggcaagattcagggttcagacaccttttgttttcaatttgacacatatacattgtgctcctgtgacataccaggcattggacaaggtgctgggtactcagtggtggattaaaatatatacaatctctgcccgtttgggactcccatgtagtggattttgagctgggtgaccttaggcatgtctcttcctcctctgagccttagtttcctaatctctaaaatgggcacgacaggctgtctgtcccagcatttttgtcaggccttcaggaatttaaatgtcaaatacaattgtagattctcgataaacatttaagtggattgaatgcttctccttcctggagagggctggcaggtggtggggagagtttttctacaaggaaaagagaaaggggagaaaactaagacattatggagcacttactgtatgcttttcatgggatcttcctgtcaaccctggaaggcaggtgttctcttactcaaagagaagatgaggaaacgggggctcagagagggaaagggacatgctcaagctggatttgaacccagctgcctggctctttcagctctcccactctgatgctgggcagggagtcgaggtccaaatctgaccacgcctggccctcaagccttattccccagcatcccccggggtctcagtctcaccccattagcgctgctttaaaaagtgcggaccgaccagggcgcgttattgcccacataaatcaggcagctccaagtatggaacacctttaaacaaacagctgatgggagtgaagttccaggatcattattaatagcttttcatttcagtggccgctgtgctgtgacatgccttcccagcagaaaccctgcgcagccagcccccgatccgccgatcccccgagtctaccagtcagaatgaatgactgtacctttgtgttaattgtggagcccagccacatgcagaatgctaatagggctgagtgagagggggtgggtgccagccttgcctggttgctgggcggggaaggaccccacctctggtcttcctccgtggcagccagctgctatatctgtctaacatccttatctgagctctgccctcctctgctctagaaagccctatggctcctgtggcccagacccaattccagactcatctgtctgccattcagggtccttcatgtctcttcctttctgtggctccagcctcctttcttgcattccaataccatggagtcctgtgctgctcaaactcttattcatttattcatccattcaatcaatcatccatttattcaataaacatttactaagccctctgagggatagaggggatgaagctgtgaacaagacgggcatggtccgtcatcccatggaatttaatatcaagcagaaaagacagacgttaggtctgtgtcagtttagctctttatcatctgtgtaaccttgcatgaataacctcttctgggcctcagtttcctcctctgtagaatgggaataataacagtagctacctcacacggtggtgtcaggacttaaatagctaaaaagatatgtgaatcactcaatattcctctgatcatttactatggagtaagaagtactccgtaagtgttagctgttattatcattattaactcacgacttcattaaaacatgcgatgatgactataaaagaaaggtacaaggagagcatctgacagggagctcggactagtctggggctcttgggaaggggtccctgagaaagtgatttgttctcagactggagtgtgggggtggcgagggcgagggcagccaggtggagggaacagcctgggtagaggccctgaggctggatggattttgccaagctgagaacctgaaaggcagcggggaggttggcacgtcaggagcaatggggaagaaggccgagatgagacaggagaagcaggcaggaggccacaccgtgcaggatctcgtgggccttgttaaattttagatttcattctaagagcaatgggaagctattgaaagcttccgaagcagaggattggcatgaatcttattctgtttggaactcacccaggctactgtgggtgtgaagcagactggcccccgccccttcacctgctggggtcccccatcaggtggctgagaatgaaacacggacatgggagaggaggatgttgtccaggtgaacaataatggtggcttgaagtaggtgggggcagtgaggttggagaggagtgggctatttctagagacatacggaaggcagaatcctcgggatatagtaggaatgctacggggagctgcaagatgaggacctgttcggtaagaccttgaggtggccccattcacagatttggggaagagagggaagtagcaagtttggaggataaggaaccatttatgtagcttaacattccccaatgtgtggaggcctgtgagcccttgcatgtactgttccagggagaatgtccttccccaatcttgtctgatgggggattttgtatgaatcactcaaagccaggctccaatatcccctccaatatatgaatccctccctggtaccccagatttggtctctctcccctatgtgtccacacctctcccagcaccctgtacctcatagagctcttggctccttcagtttcctctgctgtttccatctcatttccctccaagttttcgaaggccccagagggtagtccctgggccactcctcctcagatgaccacatgtaaccccgcagcttgaaaccccatggatttgctgatgacacccaaatatgtgtgtccaactcagatgtctgcccaaaacccaacacatagagcctcttgcctgttcagtgcagatatctaaaacgcccttcaaaaccctcatgtctgaacccggactcctgagtcctacccccaaccacacacaaataatgagaacataaattcaaaaactgctcctcttccagcattccccagttcggtaactggcaactccatgcttccagctgcttccgccaaaagccttgaagtcagtcttgacttcacaccccacatccaatccatcagcaaatcttgccagctctaccttaaaatagatccagaatctggccgatcttgccaccttcattgttagcagcctggtccggccaccatcatctctcacctggatgattgcaacagcctcctaactggtatccctgcttctgccctggccccctgcagactgttctcagttatggtgttaaaacataaatcaggccgtaacactccttctctcaaaattcttttggcttcttgtcttactcggagtaaaatggctcataagatccaacaagaattggcttcttgttacttctctgaccttttcctactcccctctccctctatttcagccacactggccctctggctcttctctgaatagaccaggtatgatcccacctttgggcctttgcacttgctggtcctcttgcctggaacaccctcgcccctgatgtctgcctggctcactctctcccttccttcgagggtctgctcaaatggctgaccccatgcacctttcccttacaacctgtgataaactagctcctcagttccccaggccattcatatcccctcatcctgctttcttcaccttctccataacacttatcactatctgatatattataaatggatgcctcctttctctataatgtgagtgccatgattttaggggtgttgtcttttttgcttgatgctgtattcccagcatttagaacagcgcatggcacataataggtgctcagtggatatttcttgaatgactcgcatagtttttatctatctgtcttcctgtttgtctgcttgtctgtctcccccagcagacagcgggaagccactggatccgattctccactgctttcctggtgtccaacacagagtctgcagagtgggtgctcatcaaatgtttgaataaacaaatgaataataatagaatttccagatggattgcctggggcgatatgagggagggattatggctagacagagctgcctactggaaattttcctgccatttctgaaggacctggggtcacctgggaggggaggaagctagaaacatgagccaaggaatctctagaggccagaagggatagagattaaaatttaggagctggtgatggaaggatctggaagtgcaggtttccaacttggcttcatgtttgaggctaacctgtggatttagaattctgttggaagttcaggaaactaaagttttagaacaggccaagagtttagggttagggtctgaattaaggtttggagtttggaaaacaggttgaagctttggatttaaagttaatattcagaattctagttagagctgagtgtttgggagctgggcctaatgtttgtggtcaactggttttgagaatgggtcaagaaatgaaaactttggtgagaaaactgtacaaagttgaaggtggcatcaacttgaggggctcaacttgaggatatttattagattttcaaagcttctttgccaggacactatgagacagaagctcacaatatatagtcaagttcttgaacagtttttctccaccaggggcaattttgccacccaggggacatttagcaatgactagagatgtttctggttgtcacaactgggtgggagggtgctgctggcatctagtgggtagaggccaggaatgctgctaaacattctacaatgcccgggacagccctccacgacaaagaattatccagccccaaatgtcaatagagctgaggttgagaaacccagcactggaggatttattcattctctgaagggttagccaaggctaatccaagtgggccaggagtcaggatatgagtgtttagggggagggctagtgcgatgcgggcctgagctatagagtcaggtgtgggcacccttgtgtccccctcctcctggatggagctgctgacagctaactctggctctggcagactctaagggagaggaagggggttagggtggagatggggagggagaaggaggagagggccagcccaatgtgtcagggaattcacgaagctagagacaagcagggtgggagctggtgaaagagagagagagagtaatagttttgcagagttgcagagagcccaagcagggtctatggggggtgtgtttggaaggaaggctgggggtgtggcatggatagtcagagagctgcagagagagttggcatctggagggcctggtgtccaatgcaccctctgcaacttatgtgactgccttgttcaagacagaattcaaataataacagctggctgggcatggtggctcactcctgtaatcccagcactgtgggaagagaggcaggtggatcacctgaggtcaggagttcgagaccagcctggccaacatggcgaaaccctgtctctactaaaaatacaaaaattagctggatgtggtggcatgtgcctgtaatcccagctactcaggaggctgaggtaggggaatcacttgaacctgggaggcagaggttgcagtgagcagagatcgcgccactgcactccagcctgggagacagagcgagattccatctcaaaaataaataaataaataaataaaacaaaaaacaaacaaaaccaaataataatagctaacacttgcatcgcacttactctgtgtcgctctaaatgctttacatctgttaactcatttttaatcctccattgagcctgtgtgatgggtactaccataatccccgttttacagattggaaatggaggcaaaggggtcaggtaagttgcataagatcccatagccctgagcggccctgctggctccagagctggctccaggcttctgttttccatttgcttcctctgccgtcgacattcatgatctcatcacaccctctcaatagtctcccgagataggtgctcttgttacggcccctgctgcactgatgaagtaaccaaggcacagagaggtgaacgacctctcaacacagccaggtctgcctgacagcaaggccacttctgctcctctgcgttgcagcctggggtgcacctctgcacagccccatgtgcccactcttgtggccatatctgatcttcacaaatggcctcagacttcagggtttctcagcctcagcagcagtgacattttggctggataaccctttgttggtgggggctgtcctgtgcagggtaggatggctggccgtattcttggcctctacccattgaataccagtagcactctttattcccagttgtgacaaccaaaattgtcctctagacaatgccaaatgttccctggaggccaaaatcaactgctctcccaccccaatggagaatgactgctccagacagtaggcaaaggaggatcctcctatgacatagtggatcatggaagaaaggaccagagagggtcacaccttacccaaggtcactcagagagttggtggtaggacttaggtctctccagccaacaggaaggcatgcctgctgagctttcccactggaggctccctcccccagggtgagtgttgagtgccaacgatatggcaggagctggctgcctgtcccaataaatgcaaaggtcccatgagcagcccgtccttttcagagccctctgctctccagctgagctgaggtggggttcgctctgctcctagctgtggcactaggaaaacagctgtggctttgatgtcaaacagaccagatttcaaatcctagctctgccacacccatactgtgggactccaggcacagcactgaacatctctcaccctctgtttccccatctgaaaaatgggcagtttggattagagaatcgcaaacgcccaactaactctgatgttctgattttctgacaaattagggtatccggtgtcttagtcctggctgtgcctgcaactcaaagtggcatcttgggcaagtcactgcccctctccagaacccactctcctcaatctgccattcaccttcaagcagccaacactccagtcacacagaacttctcattgtgatctaaaccgtgaattcttccctgcgttggttcatgctgcccctctgaaatgctctcctgcccattatccacctggagaactattcatctttttaagactgagcccaagtcatttgctccagggggtctttctgattcctgcaggcagagttaatcactccctcttttgttctgttctggtgcttctagaagagcaccagccactggttgtgtgtgtgtgtgtgtgtgtgtgtgtgtgtgtgtatgtgtgtcttccccactagactgaaagagtccttgcagacagatcctgggtcttcctaatcctaatgtttttgtggtccacacagtgcctggcacagagtagatgctcagtatatgttgagtaagtaagaatgaatgaattgggggaggagactgccaagaccccttagtggttacaaccctctagaatccagggaaggaggccaacctcttgctgtcatctggtctgaagactgcccccatccccagtcctagcaatggcctgttgcctcagccacccacacattctgtggactcagagagtaccttggacagcaaccagacactttataaaaaatgcttttatcctccatgaagctgccgctacagggagctgtctgtgctgacctgcatctccgtgtgtgcatggagacatgtgcttgtagaagaggccttgcttcttccatttttcaatccatcccaggcctttctgaggatcaggcagggaacctatgtttttcatgtttatgtttctgaatgtgcagtctccgacccaagataggggtggctgggggtagggggagaactttggaattccctccctctaatagtcgtttgaggaatccactcttcctctgagccacatgtccccaaattgtccacaaccctattccacgaagtcctctgactaaagaaaccagatctcagttcctggttttgggggtggggaggagagaggtggtctgtgttctttgagatccatccattcaacaggtattttctgagaagctataaaaacacagaggccaggtgcggtggctcatgcctgtaatcccagcactttcgaaggccaaggcgggcgtatcacgaggtcaggagtttgagaccagcctggccaacatggtgaaaccccatctctactaaaatacaaaaaattagccagccatggtggctcatgcctgtaatcccagctactcaggaggctgaggcaggagaattgcttgaacctgggaggcggaggttgcagtgagccgagactgcaccactgcactccagcctgggcgacagagcgaggctccatctcaaaacaaaaaaacacttatattatgtttaacttattggagtctcagtttcttcacttgtaaaatgggggtaggggtaggtagatatgcctgcaagaccaaatccttaaaagggggcagctttatggtttatgcattgatcctcagtgcaacacatcagcttcaaccttcacctaaaagcaggactggatgtcctcattcagctgcgtccttcctgtggagccctagttaagccccttcccttccttgagtctctggttgcaaacgaagtgggttctgttctctaagttctggttcagctgtggggtcctgagtttctaggattctataatgatgctgaggagccatgcaacctcctctttcttcctcctgccccaaggaaggggctggggcctcagacaggagatggggacacaccagagcttcccaggggtggtaggagggtgcggaaagaggaagatctgtcctagctggggtgtgagagacaagttaacagctcaattgttatttcaattacacggattatttgaaaacaatgtttatgagtttcatcactgacaaccccgggaaatggctgctatggcaaccagggaaaagaatggccctgaccagccaatcagaagttccaactgtgccccagtttgtacaaactctcccttctccacagggctccccccaacctctgctggggtgggtaggtgggggcttgggagaaagagggaaagaaaggggcaaggaaaaggctactctgtagaagggaagaggacaactgaaaaaactgaggcactaggagaagtgggattcctggcattggctgttcatcccaaattcttcaagggcaagaacatatctgacccactgcaccttcccggtgcccagcacaggcctggcacccggcagacagtaacagggcttgttccagagctgcctgtggctgaggaggggtttcttcttcacacccttcattctctgctcactgtctggagggagagaattctccgagacctcttccacgaagggcacacacaattggccttgtctttcactgccaggaagagaacaggcatgcgaggagcctctcactggcaggtgagatctgtgaggttctggggtgtctctgagagccctggatgtctttccctgctgccctctgcagaggccgcctctccatgcaacgtcctttggcccagacttctccaaatgaggcaccccagtggtctccagaaaaaatgtttttgctttgagaatatcctgtgctctccctattcagaaagaggccaacttgacaggaagctggctggactctagctctgcagaactccctcctgaaagcccatttgctacccagcctgagctctccgctgtccactcctgtgttcccgaatccctcatcacatttacttttaaagaaacccttacatagggcttatgaatgctaggcactgttctaagtactttacaaacattagcttgtttcattctcaccacaagcctgtaacgcagctactgtgattatcatctccactttacagatggggaaactgaggtggttaagtaacttgtgtaaggacaggcagctaggaaggggggcagctcagggagcagaacccaggaagtccagcttccaaaatccaagtccagcttccagaatccaagctctgggctgccatcctcattcctcctgataggtgatgatccagcttaagtcttgcctgatagtcaaaagactcaaaaattcaacttttgttgcctcatctatttatttgtagaggcagggtctcgctctgtcacccaggctggagtgcagtggcatgatcatagctcaccacagcttcaaactccagggctcaagcgatcctcctatctcagcctctgaagtaactgggattacagtcgtgtgctgccactcttggctaattttttaatttttgtagagatgggggtcttgctatgttgcccaggcttgtctgaaactcctggcctcaagtgatcctcctgcctcggcctctcaaagtgctgggatcacaggtgggaaccaccatgccgggcctgttgcctcatctttttatatcaggagcctcccaggtgcttgtcctgaaactcctgggccctctttttgtatcttcgcagtaggggagtggcagacagatataagagaagaggcacctgaggatgttaccaataagtggacgtctgtagatcagtgctggttctcacagcccgaagtcctgatctggctgtaaggcagggaggggcatcttcattaatttggtacccactgtgaggacactatttgctcattatctcgttcattccagcaagggaggtcttacactcctcattttacagatgagtaaacagaggctcagaaagtcaaacacttgcccaaggccatccagctaaaatgtatccaacagggattggtgcccagatctgcctgtctctgactgccattagcaaaagacattattcctgtcctcaatggaccagttagagaggcaagacaggtaacaatggttcgcaaagggctgaaacagggcactgagattgaatagatgtgagggctcagcccaggtgagcaaaggtttgcaggtgggaatgggccctggagcaatggcctagcgggtatgtgtctgagctcatcaggtgaccatgtcagatgatgagttggggctttgaacgccaagcagatggtttggcgctgacaggcaaggccacagggagccactgctgtcttaggagcctctttccctccctcctgaggcagcctccctctcgcacagcagagcaatttcccaaagcattttctctaatttgtgattgtttttctaaccagaagcagcaagagtctccagcttctcccagcccgtaagacgagcctgatggagctgccaaagctgcaggtctccacccccagcccagcccacttggggacttacaagtccctctgtcctaaaagcccacccatggtactaggcaggctgcggggagggtcttatggtcccaaatccaggggcttctttcccagcctgaagctggctgagttgatgcagagacctgggagtgactttaagctggggccacccactgctggctgattgtgccccgcggacatcaagggctggtaccctgggacagagggtggcatgagggctcgaagccaggggctgctcaagggctccaggaggggcaggggctgagtgaggaggtcagggctctgtgagtagggatgcgggctccttgagggaatgcaggctcagagaggagatgagtcttcagttcaggggacagaaattctgtgggagaacaggggctctggaaggggcaggcattccagaaggtgaccaggagctaagtaacaggaggtgctcagggatggaacgggggctcagggatgggatgggtctccaggaagggtggggggctccgtggagggttagagctttcacagggggtgcaggagctctgtggagattctggggaattgggggctctatcttgagagaggaccaggcctccacaaggagatggggactccaagaagagacgggcgctctgtgggaggtggggatctggccaggggctcagctgcagggctggggtttgtgagcacaaaggctcagaaaagagagtgcgggctcagtgaggggatgggggctaacatgctggggacaggggttctgggaggggctcggggctttccaagaggatgagggcttggagagaaatggtggcttatgaagggacagtggcagtgagacagtgggaaggcccttcctccaaggttgttttggggattaaatgcagccatctcctccctgacccactacccaggtgccctacctcagctgacccatcctagccacaggcttgtctccttggcttacacagccctgtgcccctgatggtcccctcaccttcgtcctctgctccaccactccccctacccacctcttctcaaggcaagatcccgacgccccctctactaactcctccacaaatgtcccactctgcacccatttcctcaaagtcacctctatagatgatatccccctacagcccaaatgcattatcagatcggtacttcagacacctgtaatgatcaataaggttgtcctccctcacagccaacctcaatctgtctagctgcaagtgcagccaatttcttctgttctgtcctggaaatagaaaaaaaaaggctcatctacaggccactgttcattccattcttcttcactttggatacataaagtctcctctcaaacttctctcttctaggtaaaatcattctggttcttttccttggcttttctaatcattatctttagtatcaggtatcttcaaatgctgtgttaaggttttatcagagcctggcacatagtaggctcacaagaaatgtatcttggatggatggagaagttggtagattctgagggtgaatgagggtggagagacaggtagtaagaagacggaaagaaaggtggtgatacacgtgtaggtaaataacgggttggtggatagatgggtggaggtgggtgaggggtgaactgcaggcagatggatgtttaaatggaggtgggtgggctggaggatgatggattggataaatggatggattgatgaatgggtggatggatggatggatggatgggtgggtggatggatgagtggatggatggctggcttagatgggatgctggctggatgaataatctcagctggcatctcaattttcccctgcctctcccaagcataggctcccctaatttggttaatggaccccagttctcccagacaccaggcctgagactttgtcatatttcattccaccctctcccttatctcccacaaccaagcagctctgagtcctgttgatcctatttccttggggcctttctccctggcccctgttctctacaacttcattaagcccccaccccacttatctcctggacaatttcagctgtccccgtctgttgcctcctttctctttccttcaagtccatcctaaaacactgtcaacagcaagatctttctacagcttaattccagccagcaaccttcaatagcttcctactgcttacattcctcagcctggagctccacgcatctgaattcagctgcaccttccctttctggtcctctctgtctttcctcccctccatgtcctctgtgccctggtcaacggggcaaccagctgacaccgaagcctttgccaagctcctcctctttgctcatgctctttccacctgcagaaaacacctccacctgcagcagcgtcatcctagcttcaacacacagctcaaatactgcctcccccacgaagcctcccccagtgccttcgaccagacagagtcaagcgcatcacttcctcaagagcatttatggagcacctactatgtgcccagctggctaatagggtcctgatggtgggagggctaggacacaggagagacacaacctttgccttccaaggtacacagcctgctcatgtagtcacgtttgtgtgagcacgcaggtgcgtacaaacatatacagaattcaagggaaaacaataagggcacagtggctcacgcctgtgcgagactccgtctcaaaaaaaaattaaaataataataataataataagggcaaaatagcacagtattagtagctagggctcatagagcactgaatatgggcctaagtgcactgttctaagtgctttacttctaataattcatttcgccttctcaataatcctatgagataggtacagatgaggaaactgaggcagaagttcactcagctagtaagtggcagggcaaagatgggaaccctggtagtctggctcctaggcagttctctcaacagcacacagtagggtcataaatagcgctgttggagtggggtggacagagaaaagtcatgacaaggctcattctgacctcccagccccctcccactctgccaacttaactcccttctcttcaagccatttgaataaatggacactgaaatagactgagctaggggcaaaggattcagtctgctctgagacaccatagggccctgggcaagttccagcctctccctgggcctcagtttcccttctgtatcaaggacttggactcgtcagtccctaaaggccctttcaactccaaaatgcataaccctaaacacagccacttggatcctagaagacgcaggccttggcaacctcctggcctggggggtgggctgcctctcccaggaactctctgttgtccctgaatacacaatttcagcctctggtccctgtgggccccgctgtgaggccacagtcctatgtctggttacctgagtctgtctggcttgtcacctacccatcatcttgtctacccactgacctggatccacctgcttctgcttcccatccatcagcctgcccgggcccatccaccttatgtcccccgcctgcctggtgcctgtcactctgcccatcacacacacaagcgcgcgtgtgcgtgcgcgtgcacacacacatacacacacactccacctccccagctcccctcccctactctgcaagcactacggtgacaacaaagaatatggggcggggctttctgcttttttgactcgcagaggggtctgtggtgttaacatctggaccaactttccagaggccaaaacagttctctgccatccagcatccttcccttccccagggaccccccagtcccctcttcgctggccccaaggggcttctacttgaggaatctggtgagcgccacacgactcctgccaaaaacgtcccagtggtccctgaagaaatcatcggacaagagcgtgaagatgtgtgtacaaggatgttcatggcagaattgtttgtaatagcgaaggactggaaacaacccaaatgtccaacagtgggggctggttaaatgaattatgggcagccacacaatggagaaccatgcagctcttgaaaaatgatgatgtagatgtatatttatcgaaatggcaagacattcacaatatattatagggtgaaaaaaagcaggttacggaggcatatgtataaagcaagatgccatttttattttttaaaaatctatatatgtcaagaaggatatgcactgaaatggtagccaagtggtggtaaaattatggctaattaaaaatgctttcatatataaaaaggtacatacatatatacatatatataaatttacacacacacacatacacacacacacagagagagaatcactctgtattaaatacttcatatgagccccgtgcagtgttaagcgctttgtctgtattacttcatttctccagtccttggaggtaggttttgttacaaccattttctagatgaggaaacagaggctcactcagctattaagtggcagagctggaacttcaactctgctctgtctggctccagagcccatgcacctaatcagtaggttgtcatgtttctcattttctcattttgtttatctgtaacttgcctattaaaaaaatatatatatatatgtatatatatggctgggtgcggtggctcatgcctgtaatcccagcactttgggaggccaaggagggtggaccaccagaggtcaggagctcgagaccagcctggccaacacggtgaaactctgtctctactaaaaatacaaaaattggccgggtgttgtggtgggcacctgtaatcccagctactcgggaggctgagggaggagaattgcttgaacccgggaggcagaagttgcagtgaaccgagattgcgcccttgcactccagcttgggcaacaagagtgaaactccgtctcaaatatatatatagtatatatattatatcgacttgagtgataaagaaacaacagaagttaataagacaacgaaagaatgaggctggtgaactatacatggcaatgtgccctcaacttctgggctcctggacaggaggtccccaccagcgggtgcatccttctctcctctctaagtgcctgtgtattagcatggtccagctctctggggaggggccaggcaaccctggtcagagttgggccttagtcttgcagacttcaaggctgcatggcctcaggccccctctcctcacacccaaatttaattcagtgaatggagtgagtgcagctttgcaccatatgccacgctagaccctagggaggaaaaaatgaaaaagcccagtgcctgccttcaagatcttctcatacagggcttggtttctcagcctccacactatcaacagtttgagctacatgagtctttgcagtggggtgggggggactgtcttgtgcgttgtaggcggtttggcagcatccctggcctctacccatcagatgacagcagcagccttctacgcagtagtgacagccaaaaatgtctcgagacattgccaagagtcctctggggggcaaaattgcccccagttgaaaaacactgatctaatgtgctgcagatgacacaaggcaggcagtgagaaaagaaaactaaactaattgctacagaggttcaaaatatagacaggagtcacgtgtgcctggctgggtccaagaaggcttctggggatgaaccccgtccccgaaccttgagagcgcctcaagattctttccattttacagactcatcctggatggtgagctcctccttcctcatggcctcaaaactctatttccagcccagaactctctgagtgggcctagatgtttttgcatgactatccatccagcatccccactcatgtatcccattaggatctcaccctcgacctgtccacagctggtcctcacctcttcttgaaagcccttctcctcttcatttcgcatcttcacaacccacacagcctcccgagccaggaatgggaactccttctctcccccatgcccaggcagttacttagccctgtccattccactcccacaaccctcacaagtgagtccccctccatgcctcagacccagacaccagcagcccgggacctggtcttccccacccagcagcaggatgaggcttctaatggcgaatctccacgcgccactcccctgctgaaaacctgtgcgtggctccccgctgctctcgggatgaaggccaagctccttgtgtggctttcaagacccacgggacctggctgctgcccacctcgctggcctggtttcccatgactcccactccctgaaccccaacctctgtgtgttctccttcagccaactgaaatctcagttcctctgctattctccctccccttggggccttggtaccccttggcatggaggctgccttctctgctcttattcctccctaccctcctttatcccatagataactgcgagacagcctgcaggtgtgcctcaacagcacttcctcctagaagcctctgctgccccgcccactggctgtcacagttatgagaattgttcatcttcctccctggaccaccagactcctgtcagctgggattcaggctgcttgctcaccattgtgtctccaccatgcagcacaatgcttaacacatagtaatgctttatatgtaaatatatgtaaatgctttatatgtaaatatatatatatacattttaaactggataatgaatgtatggtcagacaggcagatgggtgatgcaaggaagaggtgctatttgggttgggtccttaatgctttggaatatcttcggggaaggttgttcaggtggaagggcaggtggggctggatgcaggagtgtcagattggaggcacagtgggagataaaggaggatgcagacggattacaaggaccttgaatgtcatagtgccgagtctggacttaattcagtaggcaatggggagccatggaagggttttaatcaagccagtgacacgatcccacctgcgttagagaacgatcgctctggttgccgcaggggttgcagcgggagggtatcagaggctgggagaccagggaggaggctgccacaacaggttaggcatgaaccagtgaggtctgagctggagaagggatcgcgagatggatgagaggggagaaaaggtagagattaggatgaaatgaatctgtgggactctagaacatgttcccacactgccggctgcatgcagggactccaccttcctcaaggcaaaggaagaaggatcctgaagtcagagacggatcctgaagtcagagacagatcctggtggtcctaactcaattcccctcctgcaggggtgcaggcagctgagatcatgtgcaaaaccaaacaaggaggaactgctgcatttaccccatgggaaccaaggaatataaatggagggatatgagcaataacaatactgctttatgtatggggtgtcctatgtgccaggcattgtgctcagcaccatacatgctcatgcacatttgatcttcacaacccaatgagacaggtattacattttcctccatttcacagaggaagaaactaaggctcagagaggtaaagtaacttgccagcaagtcacaaactcaggctggttggactccaatgcctacgcgcttaatcatctatttatattatgcacaggaaagagctggtaacaagtggatggctgaaggcttgtgggtctgacgacaaagcaagaagttcccagcctaatcccaatgtgacagcaggaaggagcctgctgatggggcatggagggaaatgtgggggaagaagggaattcctccaggttgctgtacctcatgtgtttgaaatcagacccacatattcggaaaggtgtgtgcccattgtaagagagctgagctaaggagtgagtagtgaatatatccttaacccccagatgggccacctttggagtaattaaagaaagggatccttttctgggggtaagcagccccataggcccatggctggtaagtatatgaagcctttttgcaaattagagaaagatgccccctcctccaggcaggcacagcctgtctttggggcacctgacttggagagtggagcttaaaatagatttcagtccccgctctcctcctgcattaaatgcccttggacagtcaacaacctgcccaactgcatataacagccatgcctccagccttcctgtcctgcacctctgtttccaagcagccactgtgtatcatcaacaatgagaaaacgtccctcctgccagatacacagagctcaaatcactccacagacaactttcttgttaggccttgtctcctccatgggcggaaagacagtcctatcatgcccactgccctgatgaaaagttgaggtcagagcctgtcctcgtggtgaaatatctaggctttctctagagaggccagaatcaaaacacaaggttgtaggaaggagaggcctgagttgagagctccatcttaaaggtgctttgaggaacccggggtggagggtgtgcccactcttgcggggggcatgaggcttttctctctgagcctgacctgaggcctgggtttcctctcagcctgtttccccacctggtccccagcccctagcacccttcctggctcagctatggggaggaatgaggaagtccttggccccggggcctcagcccagacaccaccgtagggtcttctattccctcactccctcccaggccatgcagtgccagctgctacccgtgttatataaacagaaatcattcactctctctcactctacctgaggctgcatttcagattggagcttcctgatggaagaaaaaggggagggggaagaacagagagagagaggagaggaagtttaattggctgactcttatcgcccatgtggtaaataaactggctgctccgaactttgccaactcgggaggagacgggccctcctgggctccctgccttagctatggcccggccccctgtcagacaacttcagaatgcagcgctcctgcaaagctctcagaaagaccagtgcctggggaagcagcaggggctttgggggttccaacctctaggtatgattattccagagcacgaccagaaacatccagagatcacagccacccttttgacagaaaggctgtgactcacccggaggtcacaacacacttttaggggccaaactttgtcctctgcttctgctactcggcgtctctgctaaaggcattcaacagctttcctccggcactggcctgggagcactgggggtctaacttgaacacctcatgctgaatttagagcaagtgtcttcttgtcctgcctgcagcgtgaagccaagaaacggctctgttttgccccaggcctacccaacacataagcagcgttggtgaggcctggatgtcaagatgcctgggttcctattccggctctgggtatagcttaccatgtgacctcgggctgctgttgccaatccttgaaaatggaaaagagggcagcccaggtggtctccaatgtgctgctcacagttaggaatagggaaaggggttgtctccaggggtcccctgatggggccacccaagaggtacaggtgccccttagctgagagagacctggctggctttataaagtacctgcccccgaggcactggcagtggtggaccgggaagggcacacagacatctccaggaagcagtgtttaaatgttggcaatgcccttcccttccaggaggaatggaagaggagtgtcccagacactgggacaaggagggaaataagggtgaagtagagaaatggctggggcagggaacagttgagtgctacagaaaaactgaggcagacaggatagaagatgggtcggggttgggggggacgaggaaatggtcattggtgggcaaagaccaaaggatgtcactatgggtgtagaggccaagtttcaacaagggctgtagactaggggcaactgagggggacggagtgggcactgatggacacatatacgggatacaaatgaaggacagagagtcgcggtggttagggaggagcctttgggccctagggcagtggtgatgctgatatagggtattggcgctgaccagtgggagaagaggatgagatcctgaacctgggtggagagggagagagagctggcaacagccaaagccctcaaatgagccgctgcctgtgctgggggcacctcggccagccccagaaacctggggagtgctggaatcagccccacggaaaaagaagctggcatgcgcaaccctggcgacgcccgaagggtttggagagaagaggttccaaggagcgagcacctcggaagacctgagcagcttcaaacagcagcttctctgcccgccacaagggggtgccctgcacctcggggagacctcgggggatcctggatcagccctaccctctgcagccccgcctgggacagggcccgacgttgccagagaagaggcagcggggaggcgcgagcgagacgggtccacactgtgcccacccagggctgcccggcaccccgcgcgcccacgcagtccactcttcacagtaaacgccgcggcccccgagggttagccctaagtggcgctctctttggacgttaggctgtcgggggccccgtccttcttccccagcggggacggtgtctccggagtcgggtcctaaggaagagagcagcgctggctctcgctcaccgccagcccgcccgacggccatagggcagggggggtcgcgccggtggggccggcaggggtccctgtgggccgcctccccggctcagaggggaccagaaccgtgcgtgtcgccgcggctggagtcagcctccgggtgtccccggacgcggcacgacctcgcacacacacaccgcgcgcacacgctcgcgccgtgcggtattttcccggccccggaccccgcctctgggaggggccggggagccgagccccgctagcagggttgggggaccgggaacgcctgggtcccagccctcgcgtcagggctgtgcgccaccttcccagccccttttggcgcgccggctcggcccctggcgctgccacccctcggcccgcgggggtcccggaggctcccgggcgcgcggcggacgaggttgtggggacgggtgggagctgcgggcttcgggccgagaggcggctcggctccgcgccggggaaagtttggacgtgggaaactccctccccgccctcccggccgagaggagggggcgcgcagggccgggcgcaggcaccccggctcctcctgcggctggaggctcgccccccgcgccgcctgcccggccgctcccgccggccagggggctccctccctgccgggcagcctcccctcggcggcgatccggccgctcctcccgcggcaccccgcgctcttacctcggggagcggcccggggctccccctagtcctgccgcctcgggacgctgcgtggggcgggagccccggcgcgggcagcgggcgagtccggagccccgcggccgcccgcaggagccggagggagagcgggagcgagagggggagccgcggcggcgtgtgcgcgcgtgtgtgtgagcgagagagcgagagagcgagagagcgagggagtgagcgagcgagcgggagcgagggagtgtgcgtgtctgactggggggaagtgtgcaagggacggatcccttccttcctcccgcagcctctggtggagactcggagaatgcagggcccgccgggcaggagccgcgcagcgccaagccgcaggcggccgccggcccggacccccgcagccggggaaccccagcccccgccccccggatcgcgcccctcctacaccaggaggggacagcctttccctctctcgggcggcccagtcccaggaaaccccccaggggacagtgcccctccctcctccaaccccagatccgcgcgaagggagcgcccccaggagggggaccatctacctcctcgcctggcagctccccaggtggccgcagtttgagaccagagcctatttccccacctgattttactgcgaatagggcttcccatttccgccccctgactactgcgggaggccgccttcagaggagcaggggcgcaggccagggtaggagcaggcttctcgaacagtggccgccccggcttgctgcccagaaaggcaccttgcacagaccagatctgccagttcagaaacagtcactgtgcattgaggtggacaccgaccaggtgcccagggctgagtctccaggcaggtgggaggtcgggtgtccccgggagagaaacttgtgggcttttcctctggagagtcccgctggacatccttgcaaccaacaaagtaagcaggcaaaacaagacacctccatccttaacttggtgccaccttgacctggagaagtctcccaataaaatcttcccactgcccagaaactccttgctggttgggttttccgttcttttaaaaatccggctggtctgctccctgatgttttttccacctggccctgtttctttctcctggctgcctggctctccttactacttcatctctctgggatgaggcctaatggaggagaccctcccaccccactcctgagttcccaatatgaggtcgttgatggtaggataggaccagtgactcccatagacccaccctttgtcttgggttgtaggtccccttaggagttgcccgcccccctattccccatggcttccagataggtgagtgaaggataacaggagactggacagctgcagacctctgtcccgccaagctgccaatgaccagccatttaatcacccacaagcagctgctgaagttcatggcaaagagggggcagggccctccaggacccccagctctacctcgcccctatccttctctcctcctcgcctccttccccaatttccatctccatctccacaccctagtccgtcttgctgatgattggaatcacctctcctgctggctgcccctctggcccctcctactaaactccatcattcatttatttattttgagatgtattctccactgtgccagtctgttccctcccctacgtccttctcttggtttatttcccttcattgatctcttccagccttgcctttctatcgccttccttttctccatctctctcttcccctctcctctctattcttagcctccactctttcatgctttcagagaccagaggccagccttccaggtgcatctcttcacttttggttctctcctcccgctctgactcacttttgctgtttgctccagttcccattccttctttgcctcttcctccaggctctggtgtgtgctgttcatctctggagtcagacctacttagttgtccacaggttgttttggtctgggacactgttgctgtcacatctgcatgcacacagtaggtgctcaataaatgttattgaatgaactgttgtcacatctttctcttttgctctggtctctctcttctctctcttttatttttatttttttttgagatgggggtctcactatgttgtccaggctggattcctggactcaggtgatcattctgcctcagcctctcaagtaactgggacaccaggcatgtgctgctgcacccagctccccatgactctttattagaccctcaggttttcctatcccaatgtttcctattttcaggctcattctaccgttatttccaattcttccttccttcaacaaactttctctgagtgtccactctgttgtgagcactatggctaggctctgagaacacattgaatgtttattgagcacttgctgtgtgccatagttctgcttttaagtcctcacaataatcagatactagtattagcccattttacaaatgaggaaactgagacacggtgttgaaatagcaagatcattcagacggcaagtagagagatcaggttgacgcattgggcctgggtcagacctctcactctggtctgggagaaggtaagctgggactcctgctgcagtgtggcaggggcagcaagaggcagtgtagtgtgacagaggaagaactgggcaggcctgggctctgagagcagttctgccccatgcagactgtgtgacacgtgggcaagccacttcccccagcattgatgtgaagagaaaatgagatgatagtaacaacagttaacatttagtgaacctgtgccatgtgtcaagccttctcctaaatgttttacacagataatttccttttactttcaacaaatttataaattcataatggggaaactgaggcacagtgcaactatgaaacgtgcccaaggtcacacaattagtttatggcagagctgggattcaaaccaaggcaggctggggccaaagcctgcacactgaactgttgtgcaatattgcctctgggcaaataaaatgccaagtgctttgtagttagagtttgaacgtgtgcttttttatatcgtgtggtgagtctacaaataagagagacaccactcctccagggattgggtaggatgaggaaggacttggggagagaggcatggctagggaaggattccaagaggaggcgcttgtgagaattctccttcccactccatcagaagggcacacagccctgtcttggcacaggggacatgttttcccctggagtagtcatctgggtccatgggcatttctctctctctagcccagggtcactccactttggccctattgacatttgggccagataattcttcgtcattgggcatgtcccatgtaggatgcttagtagcatccccagcttctacccactagatgccagcagcacaccccctccccagttgtgacaactaaaaatgtgtcctgacattgccaaatgtctcctgaagggcaaagtcacccccagttgagagccactgctctagtctgaacgccctaacagcagggtctgctccagggagcctgcaggtttgagcaggggtcagtgaagggtgtgtgtgtgtgtgtgtgtgtgtgtgtgtgtgagtgcatacacgcgtgtgtgttggggatggggaggctgctcttagctccaggctctgctattctccctggctcttttcctcttcttctctacacttctctgtcatccctttatctgtctgtcgccttctcatgcactgtccatctgtcctcgcttctctgactgcctccactcctgtctctgtctcctccccctcagtgtctctggtctctctgactgtttctgaatgggtgtcagtctcttgctacctgcccctacatcttctctagcacccttctcccctccccccatctgcttatctcctagctgtgtccctgcgtctgtcgttctctttccgtttccccctccctctgtcctgttctctctgcctccatgtctgtctccctctctctgtttctctgtctcttcccatctctgtttcttcggggcacccagtctccctctgtctccctcttgcctgtcctattctggttctctctgtcctcatcccgcactctcagtgccccgtttccctttctctcttctccccacacttccttctcctcttcctccttccctccttccttcccactcccctcctcccgctcccttcctctactctccccactctgtgcttcccctcccttccctcccttcctccccctcctcccgctttgtctgtgggagctggaagttaaaagcttttccgaacttgttctccagtcgctgttcccggcgcctttcatctcgccagcacatttgtaaaactgcgcagactgaagggccgtgacatgaacaaccaaagaaatgtcagcgcggggacggggccgccagcccgccggggggcgtagggagcagccggggcacaccctagcccctccccagagggacccgggacccgaacgagggcgccccacctgggactccgggcgctctgcacctctgcgagcccgctttctccgccggggccgacgggaccgcagggagggggaggggactacttggggaggggactccatgggaagggaacttcgaggggacggggaggccgcccttggctgggggcgccaggacggggaggggcgagcctgcgggagccacaggcgccgaggccgctgcgcccttaagcacctccacctcatggcgttaatcctcgcagaccccgcagccagactgcctgggttcaaatcccatcaccgccacttgccagctgtgtcaccctgggcaagtgacttcacctctccacatctcaatttccttatagtaaaatagagatggtgaagattggatgagcaaatccttgtaaggcacttagaataagtgtttgctgtaattaataagaagaatagcagcaacaactcacaaaacagggttatcgtccccatgctaccgctggggaaaccaaggtttaaggggagaaagtgacttgctggacgactcagaccaagtcaggggacgaacaggaatttaaggccagctccttcctctcctttcccctctttttcctcaaggaagtgggtgcagggatggaacacaagttctaggagcttaagaattgagtctgttttgttcactgcactatcctccgaatgcagcatatagtagatgctcaataaatacttgttaaaggtatgcatgaatgaatgaatgcaaatgctggaaaggtgccaaggttagaaaatggaaaggctactttgtctgtggtgggctggggtggggccaggtgggaaaaacaggagcccagcacctgccaagttccaagccttgggaacttggcactccatccagggcctaagcacaacggcagcactatggacagtggctatggcccaggccaggatccagctttacaccggaagctctcccgcagcctggtgggcccgccctgcttctgggcatgacatctcagcccacatcccagctccctaaccccgctcctgtaacctctgtctggggctaggtcccaaccttctgtctcctacacacactctgtctcttctctctctctctctttggacccagatccaaagccagtgggaaagacgcgcctccctcctttccctctccctacctgtcagccctagacagcttctgcagccctgaggcctgacactgcaggtggctgcgtggagatgggaataagagtcccctgagcttccctgaaagtccctaaagacacagcagagtacagcagaaactgagcacttggaccttccctcttgagcccccttccctggggtggtggggtgagacagccctaccacactccccacacacacttcaaacaccgactctccctgaattattcacctgcctctccccagggctgctgcagagcgcccagcccaggtgctgaggaggaaaaaagcagaaaggcccattaaatttaaacaccgctgaggattgtcagatgtgaggttctattcctggcctagagaagagccgccagtgggaagggaaaggggatctgcaaggggatgaggacgagggacccaccccgggccgagtgacctgctgagcaccaggagggctggggccaacatgccagggaacccggaccttccttcacctgaaggttctcacccatgaggaagtggactttgccgtaccatttcattcatgttgttctggcaagagaggaggacccatctaagaatagcttctctgcagctacctgaaagcccaccattatggcttcagcatgaggaacagggcattgcctctccagcttcctctccagctgtttccttcttgcaccttatattctggtagtgccaaactcttttagcttttatccactctgagcttttttaatgttgtccctgccacctggagctccctctcttcctctgttttgctggaaaactcctatttatcttttgaaatccagcttaagtattaatccagcaggtggcatgaagctgtcccacctctgcactccactggacctggaacacatgtccctgttttcttccctcctcctgcccctcatgggtagcacagcccttgactctcatgcctgatggggccatcacagatgacgacttcttaggaacaggcagttggatgccacggagaaagtgctaggtatcctgagaagcctaagatcttccggctgtggctccgacctcaactctctctgtgttttgggcaggtctctagttctttcttttcttggcctgggttttctattgcataaaataaaggaggagaggtgggggaagatttcatgatgaccaagagcccttccggggtccaggattctctgctccacacgtaattttccaagccctgtcttgcgtcttccctgtgtggatgctgcctggcctttctcttgttgacacctgaagcagtgatgtgctggaactggtttgtgctggcttatcaaagccagttgttagagtctttttccaggaattttgcaagccaggttggcaagcccttgaaattggccaggttgagaatatttacaccacaaaaaagaaatgataaacaatacaaatcagggcttgctccctgcttcccccagagccagctcacctctgcctgaaggtctcattcctacctccaggccttccacctccaggcctttgcccatgtggtctctggctgagcagcctctgctccatcccttgctgtctgttctctctcaccaaggcttcagacttcaactcatacctcacccactcagagctgagtgcttcttccttcacccgatagtgctccttactgccaggaatgctcatttttcgtggagaaaaatacacactttggagcagacagatccaagtggaaatcccggtcctgctctgtgctcgcaaggttgtctccttcttgtcagtggcgctcctgctcagctgttacctgtttacagagaacatccctgaccaccccacggcaaatggcacttcacccctattccatcttgctgtgacatcacccaatcttttcaccctgctttaacttctgagctgttaccccttcctaacatttacatttatttattaactcacccaatgcccatttctctctctaggatgtgagttctgggagggcagagatcttttctgtcctgattgctgctacatcctcatctcctagaaccttgcctggcacatagtaggtactcaatcatttcagtgactaaatgagtgtgaccttgggcaagtcatgtcacctgcctgaatttcagttgcctcaacacctcacctggcaggatgtttggcaggtgtattcctggcctgagctgccttagagaaaggccaaggactgggatcctagtaccagccctgccactaactcgctgtgtcaccttgggcaagtctcgcctcccctggcctcagttttgccatctctcaggggtcagatgagatgacaagcaggagtgaggtgtcatttcaatctgtgggtcccatctgctgctccctcccaccccctccccacctcattcattcattcaacaaatattaatgagcatctactatgtggcaagcactgagaatacaggaccaaatgtggggatgactcatgggctcctacatcccagttggggaggaaaataaacaagataaattcacagaataaatagaatgtcagagggtgatggtaccaaggaaaaattaaaagctggaaaggagcacggggagagttgaagagggggtgtcagttttaggaagtggcgggggagtcagggaaataactcactgggaaggggaaacataaagaaagatgcaaagaatgccaggtgtggtggctcacacctgtaatcccagcactttggaaggccgaggcaggtgagtcacattgaggtcaggagttcgagaccagcttggccaacatggtgaaaccctgtctctataaaaatacaaaattagccaggcatggtggcgtgtgcctataatcccagctactcggggcgctgtggcaggagaatcgcttgaacccaagaggcagagattccaccactgtactccagcctgggcggcagagtgagactctcatctcagaaaaaaaaaaagacataaaggaggtggctccctagggtagagggaatggcaagtgcaaaagctggaagcagaatgggcctggtgtgtctggaacccagtgggctgaggccacagatgggacaaggcatcctacccctccctccatctctcattaggattaggaagatggtcccaaagagtgtgacacaggagtctcaaaaggaagatggagggactcccctgtgcctccctccctccctcgccgcctgggcgtctcctgagtggggagcccgggctcgctgtgggtgtcggcagcttttggatcagcaatttatctcctggtgcctcgagtttcctggagctgggcacttcctccccactcagccccgctcccttgagcggcaaagacaggtgtgaggaattagctgtggggactaatgccgtgacaggaaccggcacaaaagaaggggacagagtgtaatgtttattacgtttgaagcaaagcaaacatgcggcctatttatgtatctatagagaattaattggcgagcggcagcaagaagcagattataaattagaatcattttcgccaactgaaacccattcatcttgcttcagaacgggcctgtcacctcctcctgactaattccttttaaatttgctgctttttctcaccggccccccgcagctctcacctcgcgacctgaaccccacgaggggtgcctccgggaagggccatggccaagctctgtgcttttctgagcccactctcttcctcctccagcctcctggaactccccccgtgccccacagctggtcctgggcctgagcccatgccttgcactgctgtctctccttcccctctgctctggaacctccctcagcccctctctggctctggcctgtcccctgagaatccggcaggttgggccccccaccagcctcaccttgcagaggctcaggccaggctggtggttaagggaaaagggcacatggggctgccatccggggggaccctggggcactggccactgccgcctgcttttgattctgggctccacgggaatcaaagggaagccacgctgctgggtccctggcaggtctggctctggcttctctcacctggagcctgtggagatgaaaggccagggcaggtgccagaggctgccatgcccaagagcggtgctgtgcctgccctgggctgtggcccaattaacccttcccttccttctgtctgagctgccgttggtcctttgagtctggcaactgcagggaaacctttgtggagaagagaaagtagccagaatgtgagtgcctgggactgggacaaggtagctaaacatcagaagcctaatggttcaaggtgcaggccctggagtgagcccagcctaggtttgaattcaggtagcacctccccactagggtggcacctctctgagcctcagtttctttgactgtaaaatggagcaggtggtagtagtgcctatgacctgaagcaatattcagccgggcttgttaaaatattgcagtatggggccgggcatggtggctcatgcctttaaacccagcactttgggaggccgaggcgagcagatcatttgaggtcaggattttgagaccagcctggccaacatggtgaaaccccgtctctactaaaaattaaaaaaaaaaaaaaaagccaggcatcgtggcaggcacctgtaatcccagctactcaggaggcttaagcaggagaatctcttgaacccaggagacagaggctgcagtgagccaagatcatgccactgcactccagcctgggtgacagagcgagactctgtcacacacaaaaaaatattgcaatacttttgtcctggccagcccatggaccaaatgttctctcctgctcccatttcacctacggacacctcctcttgccaaggtccaaaaactaaaggttgactcctctggcggccgtgaggacctgctgcagcctcagtggttctgattgatcctacgtgctgaactgagggttaaatattttgtttatctgccctgcttgcatcccacagatgtcatgaagattaaacaagataagagtatggtgcttggcatccagtaggtgcttaacagaggtaggtatcgttggcgccattattaatttggaccaagtctctaagcctggaatcctggcattccaggtccccacttttccccacctccccaccttttaaaaacattcaccaataacttccagcctcccccatgaatgcgctgttcccaccccagctgttgggcctgagactctctctgtgctgagctcctggaatgtgccagagcacggacctcctgcgttgggaaaccttcttctttggggatgttgagtctcagaggcagacctggagtccttaaggggagcacctcagctaactgacctctgtgctcccttctccccagattggccacagcctaggggtgtccaaaagtcccaagactgagacagagagacagattggcccagtactgcaggcagcattcaggcagttgtcaagggcctatggaaaagttcaagatgtgaaaaggaaaaaagaaaagataagctccaaaatacaaaaagaaaactgcaaaatcaaaattagtaagtgtttaattaaatgtctacaaaatctagcattgtgccaactagtcagtgccaattctgttcatccctcctctactcatgcataggagaggtctgaagtgggagtcggtgcattttatgcatgtgctgtggtgtggcacggggaccttcaaagcaggagtgtgctggggttcaatctcttgggtcacagctctgttccttgctcactgggtgaccttgggcgagtcacctccgctctctgggcctgtttcttctttcttcctctgtcaaatgaggagaaccacttcccagctcccagagtggctaagaggctatggaagcatgtttcaggaaagtctggcaagtgctgatctcgtgttgtgggaatccagcaaggggagggggcttgccaagacctgctgaagaagacttgaacctcaacctctgagctcctctctgccttgttcccctgcacagggcatggacaaggacgatattcgaatgtgtaacagttaataatggccattggagcaagaccctggaggccctgctgggccacttgtaacccattagttgctggatcctgggaagagtcaggtgttctggggcagagctgggtgtcaaggaggtgggctgagcccttgggaaactctacacaggcaaccacctatttgcccatcagaatggaaagatgtcagcatttgaacacctggcacagccctagtgacgtgtgctggctccacctagcctgtcatgggtcatcctccaagatgggccaggacacttttgtgagtgacgtggcatttagagatcattatttatatgctgaccctatgtcccagagattctgctcctgggtgtaaatttcagtgaaattctcagcatgactgggaggaacaagtctgaggattcttgtgcccatgctgtgttgaggggagttggaggcaacccacctctcctccctgggggagcgtacaggaagacatgggagacacaccctgcagaggtcctggcaactgttagacaagtgtagagatggccatggacggatctttaaaacatgagatgaaaggagcgaggaaccaactgggatctatggcataataccatctatttgaattaaatgtgcattcagatggtgcttatatgaatttatatgtgtgttgaaatttatagaactatgcgcccaaagaaagtcaatgttactttgtgataattgaaataaaataaaacaatataaaataagacaagtgaccactttcagagggctcatagtctaggaggggagatacatacgaaaaaattgcatttatacaaaatcatgctcatttgcaagaacacatataaaacaaaggatctcttgtgatcttgctccattatcttgctccaggagctcccaggttaatgcagaagacagacagaaaaatccttactccagtatcatcagggctgtgcatacatatgaggcactctgggaccacagaggaaggaacaatttattctgtctaggggaaccccagaaagctgcccctgaaaacaatgatatgtaatttgagtcctcaatgctgtctacgaagagttcatggcataatatgatctccctaccagagaacaggcaacacttaatccaagggaatgaaattgaaatagtgggttttagttgccatgggagaagatgtagttggccaggggtcctttcaggctggggacacttcttgccttatcagcttctggtgtctgggccccctgcaactcaagctgggattgaataggcaggctgtgtccccatcccgagaggcctagcgtggttccctgagtcggagaagaaaggtggccctccttgcatctgcctgggaggctgctgtggccttcctggactcctccatcctgcttccaccttcaatccatcaccttttgcttgctccccttccatcccagtagcacatggcccaagcacaatccctggccagccctttcctgctttatcaccagtctcccttgtctctctctcacacaattccctttatcctgtagtccagagagagcatcctgaagtcaggtcttctctggggctctccatgtacagatcttcatggccctcagtgcagttccatcccctctcctgggctccccagcatgatatctccctgttctcactgcactccttaccctcagatatcgctagaccacctgagtgctgccctgctttgctcacagtgccccatcttttggaattcctttctactttccctcctacttcccccagctaactcctatgcacccctcaagacccagacctcaccccctcctggaagcctcactcatcacccaggactacaacccccaaacctctcctattgcagactagagcacactgaattgaaaccgtcttcttacttctctgttaaagggcttgggttcaaagagctggctttagatccaggtgcctgaattcacatactgattctgctgtactgcactcttggaccagttatttgacctttctgggccttctatttctcatctgtacaatggaaatagaaagagtacctatcagaaaaataaaaacaaacaaaaacgctccaaaccactcaaatacccacctcatggggatttggggaggaataaatgaagcagtgggcatgagttcttggctcagtgcccagcacatagtaagtgatcaataaatgttggccattattgtctgtctccctccaccaagccaggagttcctggagatcaaggcagaatctgatctgcgtttgggggcccagcacctccccagggtctacttgttgaacagttatctgccagacattccattactgtgtactaagagattccacataggtgcccaccattagcatatttgagccatgggtcttagaactggcactcagattggagttgttccatgcttttgatctggggcctggcagtgtctatgatgggagtgaaggggccaccgctagccagatctctttccctggcctccactcacctgccccctggccgggttccagcctcccactcaagccatcctctctgggtgatgtagcatgtgaggcagaggacagggtccggagtaggagccatcaccagccagactgcccttggtcttgccagaggcctccttggtgcccgcctgcctggctcctgcctggctcccagctcagttgcaacctttcccaactaggctttcctgcctgggtggcccttggcctcattaacaaggaagtgttccttggcagcattactaattagcagcaaaagacgattagtgtcattaacagactcaaaacatttgtattattagctccttggtggtttggggttgcctggacctaggtagggatgggagcctcccgggtggagagtggacttgagagggagctggcaggagaggcagtgagacagaggtggcggggagggagctggtgagaaaaaaaaaccacgaaatttaaagtgaatgaattatttactgcaggaaacaatcccggactcactcactctgactcagaacatcccaaactgtaatctgcggcatttttcacatctccctagtgtgcggagtgattttctttacaattggataccagaggccgggggaatcttgtaagagattggcttagtattgatcatgtgtgtcttcctgggtccctggctcccacccaccctcgaggctggcatctccagcttggacaacaccctaaggctggctggggccagagtcagccccaagtgggagctgatgagggggccatgaccctggtgagcatttggagccacgagaataggccccttgccctaaaatgagctgaatgtccctgtttcggagtcacctcaccccagcatggtcactgaaggagcccctgccatgttgccatatgtttcagatgcattatgtcattatcccttccaagagtcctaggctagatattattaatcccatttttcagataacaataagagctactctttatcgacctctgcctaggtcctaggcaccgtgctaatatctttcatttattatctaattgtttccttaaaacagccctggttatggagagactcagagaggtgacgtggcttgcctagagtcacacagcaagtggcagaattggccccaaatcctggtctcccccttgccgtcacggggcacacaccgacccctctaccccgggcagcaatggaaggagggtcaaaagataagggacataaaacccagggtaaggaaagacagcaggtgttccctgctactcgggtgcccctcccagtgactccctgacagggccatgcttcacctggaaggacgtgtctccaacagcgagcatcaggtggcgtggagcacgtggagcacagcattgctcactcatggccagaggctgtcttcagagcagagatgaggagtctggctggctgggaggaccagaaggaccctgctgggctgacaagtttcgcctgctgcaaggtgcctctggccctgagggtggggggtctccatggagtcaaggaggagagaggcggcgctgagtgcaaggaggcagagaaagcttcccagcaacggcaaaatccaggctctggatctgcctctggcctctctgcttcccttctaaggaggaagggaaggaacctgagtcccaggctctggtcctgacagggctgggcaactttaagtgggtgcccgctcttctctgggcttctgacttttcatctgtaaggtgaaatctttgttgcttaaaagggctccttacttgagttccagtcaatgaggtcagccgttgccctaggtgtaaaggtggggacagggtagtaggtgccaaatctcctcccaccactgcctacacccccaccccccaccctggaatgctagcctgtcggtgtggcagtgacctccaatatcggtggtgccaacctacccattttatagatggggaaactgatttatagagatgggagtggaggtcacataagggatccgagcctatgcattctgacccttggccaaactcctctttagtcagccttacccaggctgcaggggcaatttggctctaaggccactttgtttgggactgagggaccacaggcacaggacaggcagagggagcaagaagtggatcccacaacaggcttgtggctctggcattcggccacttttctctgtcatcgtaactgtaaataaggcatctgggagtcctcccagcactttaacagatttaacaagcagtagcatgcgacccgcagtccaaatggattttttaataatgaataagcatttatttaacaagtaataacagttttaccaccctccggatcctcggaagtccagaggtcttgcattaacgccttacacaggcatcttctgctgctatcttttgtccatttttctggttgtttttctcttattgattggcaaaagctctttgtatattaagggtattaaccctttacctgtgatatgcaaatattttaagtctgtataattattaagttttccttagggcatatagaagtttaaatgttttatgttgcaaggtgtttttttgtttgtttgttttttgttttaatttagagacttctgagttttcagaattgcttgtgagcctgaggaaacctgtggctctgttgcagaaatcctcagctgagttcaaacacaagagccctggccatggagtacaactgtgggtgaatgcctctcttgagacctcggtggcctccatataataatgtgttgaaatagacaacctctcagctgccccctgcaggaatgtcccatgattgtaagatgggattttgcagggaagaggctgcagtgcactctgagagaggtcccagccatacagtctttcacaggtctatctcccccaccacttccagcccctttgagaacaggaactgcgtcttttcattgcgctgtccttagcaccttgcagaaggctgcctgcctcatagtatgccctcaggagaaatttacccatctgcactgctgattgtacctggaagtgagccctggctccatttcatgcccctgtctagaggtggtagaatggagtggataagacagtgtgctccctgggtttggatattgacttttgtttgctggctgtgtggccttgggtaagtcgcttcacctctctgagcatgtttcttcatctgtaaaactggggcaagtcctcccagagctgtctggcagcatgaatgaaaaactgatctagcagccaaaacacatgattcctgccatgtcgtgggcaatcaatacacgtcaggcctcttgtatctccactgctgagtggagtgcattccatcttgagatgctaaaaaatcttcagtgttcccacagtttgggttccagagtagaccctgagaaatggattcaagggcaagtaatttatttgggaaatgatcccaggaagcaccagtaggacagtgggaaagtgatacaggaaaggcaggcaaccaataccgggtgctttatcaagcctgttactactgtgggcaactggagctcaactctgctggggaattctgggagggagaataggactcacatcacagagcaatccactcccattccccagcaaagggtgagggaggagctggggtacttatactctggcttcaaatagtcatcagttaagagctggacattaatttcctgactctttcagtctgcccactgggaagcaaagtggctctggaggcctgagaaaggaactcaaccaggcatgccctgaaaggctaaagatgaggtcctgacacctttttggaagggcaggtgaagcagacatctcaagtaggatggccccaaaagatttaaaggtaggattcggtggcagaaggggagttaatggggcctgattctttgttgctctccactctgattgccacctgaaattgatagctggtaccaaagggcagtagtgtcacctttcaataagatgaaatctatgtctccagcggatggagacgacaggaagatttatcaaggccctggcaaaattaacatttggacgggggacacggcaagaacagcctccagagggggtctctttgcatttattctggctggttcctgccagcggctggactggaaagagctgcaggggtcagccatccagctggcctctcagggagggacgcctggacagacagatgcagacacccagggcaaaaggagactggaaggagaactgtcatctttgctgagcagggaggccaccagggcacttggagctgagtccttgccctgccactcacttgttgaaaccctttgcctcagtttccccatttgaaagacaagggtattgtgctcaatgcttctagctctggcaatctctgagaccatgacacagaacaaagctctgcccgggtgctatcccagcagtcttgggaggtgagcatgaatacatccacagaatgatggctagcctgggttgagtacctattacgtgtcaggcactgtgataagtgctttacttgtacttcctgtaatacttacaatagccccataaggtaggcacggtggtttctgcattttgcctttgagctcagagaagccaagtgactcacccaggactacacagtgagtttggggccaggtagacatcgaaacccaggtctaccggttcccagtgcagggctccttccactgtagtcatcctgggttccagttccaggccctctgatactgaacttccaaaggagtctcaacttctctcttgcacaggaggatgtatccagagctcaggttctggatcaagataaacctgggtttgaatctcagctcaatcaggtccttgccgtgtggcctggcctgaaacattccacgggagcctctgtttctttgtaaaatgggcattggagccatgtctatcatgaagatgacatgaggcaacatgcgtaaagggccggtctctagggtcactgggaaacaggcttccatgtacggcctcctcccctctccattattccactgtggacttgcagagctgtgtggtttgcatctggggcacatgtgggaattaatttgtgctaaggaggtgaggtcctccctccaggtgagcagtgtgggacaagggaccccagcaggcctggaggatgctgggacagaggcctccgctcagagaaggagaaaggcagggccgatggaggaaaggcaggtgttgggagcaagttcccctgccccacctcagacacttgcactgaatgcgccctctgaagccccagccttctaccctggaaacaccctgggccctggggtggaggagaaggaagggagcccttggtgggagctacagaaaattaaagctaaaaatatgtctgggtcagacctcagtttccccatcggtgaaatgggtgcaggcagtaacacccccaccttaggcctatttgagcgtaacggggtttttaaagttgggattctaggcccctcacaaacctgaaagacattcactgtgggtgctgtctggactctgagcaacttacttaacccctccatgcctcagtttactcgtctgtgcaatgaacgtaatcatacttaatgcactgggctgttgttaggatgagggggtgaggagtgctgtcctgaatagcactaagaacagtgtctatgtctaggaaatgctatgcaaatcatggttgttgtttttattactaatattattaatatcattatcatcatctcaggtgagggaatgcggggcccggagaggggcagaggcttgggaaggccacatgatggtcaggactgtagcctaggagtctggccttggaccacagcctcagcccaagtcctcaaacatcccctcccccatcaaggctgccacatccccctccctcaccagggagtgagaggaggcccaaatccaattagcctgggagccaactgcagagcatcgcccctttaatatcgcaggagaagctgcagagataaatgagaaattagaattccgctggggtccctgagacccgcctgccggcccgccctgggctggggctgcggcaattctcctagggacccaaggagctgtctgagccccagtggaggaggtgcccctgaggggccctgggccagtgcctgagtttctccttaggcctgccagccgctcctactcccagcctcccattgcccacccaccttccccgctgccgccatcccactcccctccccgtcaaccatagaattcacctttcctctcgagagacccattcctctcctccttccacagcccctccctcccagtatccgagggcatcagggcaaggtctaaccccattcttggcacgcccccgcttccccttcccactcccctcctctcagtcctaacaaaacccaggatccttccctccttgggctaggactgactctgcagctgaggcctctcttgggcctgggggattctggggaggacatcactagtccccctcaaggaagaggaggttcagggtctgtaacaggagctcctcctgagcgttccagagtaggtgtgcaaatgaggcatctgcagccccctcctctagagggtaatgggctgtcatacaaagccggcaggtcaccaccacagccctgctgtggccttccatagctccctgtcttgcacaagactcagtttccccttatgtacaatggagaggggctgacataggtgcaggcctaagatcttggcttggacacttggcccaaccctgggaagcaggcaggcccccctatcatcaacccagcccacccacctgcctccctccctcgggggacatatttgctgctgggaaagttaatccattacagtttaaaggctccgttcctcgctggcagtaaattacctgctttgcattttgcagcaacaacttaacggtattaatttattgtgctctgtctttaacaaacatcattatcatattgccagccaggattatgcaaatgggagggacaagggagaaagaggctgaatcttgtccccaaagtcaccttgatttattaactttggggccctgcaattggccaggtctgggaggtgcaggtgagtgcagaggccaggagaacccacaaagtctgggcagagagagtcctgaggccagagggggactcccaggggagggcacccttggagggaagggctggctggggcttagagggattcccttgtcaggtgactttggacaagtccattctgtcttgggcttcggtttccccacctgtaaatggaggttgaattaagaggtccctggagctcataacatatgaacttgagattcagcaatacattgtgaatgagtgagagagagagagagagagtttatgtgtttgggcagggtgggctgagtagagaagaagccacgtggtcctggggctgcagtgcccccatgccgggctccctggctgctgcggctcctgagcaccaggctagtcatggatgggcacatggtgggagatgggtgagctggggctgagaagagaggggtctaagggaaggggctacttctgggctgagagtctaaaggctgacggcaggggtcagttcatgagagggtctgagacttttaggctatacaccaagatgctgggttgggaaggggaggcaggaccatgccaggctgggaggcagcaccctttagctcctgattttgcatctggcctgggggctgggctggctggaggtctactcatggggtcctaggcctccgcacagcctccggcagctcctcctgagcctcctggactctgagtttaccccgagagactctaggttgggctgccaggggagctggaggcaggtgggctgggccccccctctgcccctccctgtgcgcctcctcccttgggctggctgtggtgagaacccgcctgattacacagctggctgcccccggccactgggcctgctccccaccacctgcagactggctctgccaggaactcactgggactacatccaagcacccgtgggcgccagcccagggttctgccctggccatcagggtccttcccgggccctgcagaggcgccaaggtgggagctggagaggggccaacagagaggagatgacaccaacctggctggccaaagctctggcctggcgggtgtggggtggtggggaattccacggggagggtggcaccccctgtctactgaattcctgagtggccccctctgtggccccatccctgccctgcctttggcattttgccaaacctgcccttgcctcctggtgccccaatctctgcctcagtctctgagcacccccactgccccctctacttgctctgtcctgcatcgctgtctctgggtctctccctgtcatgggggatggggctagggagggagcaggaagcagagggaagaggtattgagggggcatggagtgggggagcaattcaatttccagagttggccctggcaataccggttgtgtcgtgataagaaagccatttcccgtgatggctcctaatccacaccctcctgcctttgcatgcagcagctcccttcatctgcctgtggccagaggctggaagggatccctgtccactatggaaggggccatgtctgctccaaatgaaccatgctgagcagcatctgtgtggccgggacaaagacccatgccgaaatctacaagcccaggagaagccgtcaaacccgatgaataatccctcggactgttctaaattcagatggacatgcacagctgtgatctaatttgagccatacatctgcccttgagagaagtagggatcactcccattttacagatggggaaagtgaggctcaaagtggttcagtgatttgcccgaagctacacagcaagtgcgtgtagagagaagcgcaagttgatgtgtgcagggctgaagtgtgaggtgagggtgcagtgcgggagccgcagcctgggcttcgaaggtcgggggagtaggggaaggaggggaaggagacaggcagggagtatgaggagaggtgaggagaggtgtgtgctgggcagcagctcggtgggagcccagctaggaaaggagcctcggggtggcctcgagaggattttagtgctgtctgggcagggggtctgtgggatacagacctgggagggatgggggcatggtggtcagagaaagaagctgctggaggacacaggcgagccaggaccacagtcagggaggcagctgtgactgtcagcaggaacacgggaatcctctacgagacacctacacctgagtcctgacatcaaaggggtttctcgcctctccggtcgcctggtttggagctcagctttcttgaaaactttcttcctgccagtctcctgcacaggccctggacactccttgggctggactgggccccttttccagccacacccttcactggctgggagggttgcagggaggcctcgggctgagccaggcccttctgctggctcccctgtggcccgcaggggcagaggagggagggcagctgggctggggattcaacaggaggggcagtctaggtgaagccagccaggccctcctgatttgctccccaccaggaagttttctttgtttgttttggtttttcctttttgttttattgagacaaggtgttgctctgtcgccctagctggagtgcagtggtgtgatcacagcttactgcagccttgacctcccaggctcaagtaatcctccagcctcagcctcccaagtagctggaattacaggcacgtgccacctcgcctggctaatttttaaactttgtagagacgaggtcccactgtgttgtgcaggctgatctcaaactcctggcctcaagatcaaagtcttggcttcaagtgatcctcctgcctgcgcctcccagagtgctgggattacaggcatgaggagaactgaccaggaatacaagcaaggatggatcccgaatcctgtttgtctccctctgcatccctaccccccactgctgactccagaaggcctggtggggagcggtggtggatctgggggctacaaagccgggcaggattgtttaccctctccctaccttcccctcactggcccaactgtgatgggggtgagatggcaggctggggctgtgggaggctcccagaacagctggtggctgtgcagggccgtgggtggtggcaagtggggacctgctggagcaggcaagctaatctcatttggttgctgcagtcgcaaacaaggactgcatgctaagtggccagaggcagcagcgggactcagggccgacccaggccccacgcatacctgggagcacctagaggccagccctggtttgaatgaggagccatgttgggcaggggcaggggaataaggagggggaggatgcgtcttgtggggtaagaggttactccccgggaaatacctgctgggagatagggcgccagggtcagccagctcctcccaatcctctggcctctcctcctctagccctcctcctgtagggtcctggatcagatgccactgggcaggaggcatctggagagcaagcttcatcccctttgccagcagaattgtgattggagagagggacccgcctgttcacagcagagcatgagggaggcatcggggaaggtgctggaagaggggaggggagggggctgggggagccttgagcctcgaggccctgcccagtcactccactcctctgagcctctaggggcttgtttagaggcagggccagggaggtgcaagaagatgccctggctgtaaaaaggtgattgggcttgcgactcttgtgaaatggtctgaaactatctttagcttagatgggagtgccaggcttgcagggcccaggtttggcagatgagccaggccagaagccagtgccctgagggcttcctgactgccacccacactctccgcccggctgccacttctcggagcagctggtaccatcagctcccagggagaatcctgaaatcacacaggtagctctggtctttgggcaaaggtttgtgctctagacgtgggtggcctgaacttggggctgcatcatggtaacagatggatttgaaggcagagcttgcaagggagtccagatggccacagccaccatccaggtctgtttttggtacttgctgggcccctgtgggcagctccatttgcaacccctttggagctccttagctcaggtcttgctgataaaaataagccctgccaatcacagggggcttgaaccactctgtgactcagcttccacatctacccctgaggggctgctaatgaaatgaaatgaggcatctcaagtgtcctgcccagaagccggtgcaaaggaagttctgttttcgttttgcagcatctcagcccagtgtaccacaatgttctatcattacagtctgatgggcctttagaaaaacggctctgcttcacttgctgtgtgactgtgggcaaatatcttcacctctctgaacctcagattctccatctgtaaagtggcaacaataatacgtactttataggaatgttgtgaggagctaaagaagaatataagcaaacttgaataaggcaataaatataaacacagaacagtatccagttggcaataggtgcttgatcaatatctgttgcctgtgcaacactttacttttcagggggatacactgaggtccagagaggggaaagagttcatccaggatcccagctggatcaaaggtctcctgatgtctgctggaggaacaagagagaggaaatccctggccttttgtttcaccaactgtaaaatgagagggcttcaccgatctatggtttccagctgggatctgggctctcgggggccactgttggagtcaacaccaagcccgcggagctccgggaccaccttttctggttctcagtccacgtctctttcactcgtgaagggctgcggaaggctccacgtgaacaaacttcctgccgctcagccttgaatgtgtgaaagccccctacttgtttattttcagggctcctggcagcgcagactctctgggacagggattcctcccaagacccctgcccaggtagaccccctatgtcctggcctgggtcagggttggctcagctgcctggagtgggtgagcagaccagaagcatgaccctgccccacccccagccagctgcagcccgggcctgggatgctggttccgccagcagttaaagtccccctggttgtctaatttaatcacagctgtgtgcacggtgactctataaataatttttagtgcgacataaccattatttcactaattgcttcacgcgcacccctggcctgtgagataaattaaggtttgctgagtcagcacctttggctgatgctgctttggggtttggaagtacagccccaacaactgggctgttcccacaccagcctcagcccagcactgaggggagggcgcccctcacgtgaagtggccaagggtagaatgagtgaggaggaatgaggaaagggctaataagggtggccatgtacagttgcacaggttgtgtcctgcaccagggtgcttggctaagggggcaagtgggggctgaaatccagcccatactacacttttgcaatccatgtgctctgacatgggattttgttggcccagaagaaggtggtaccttcttttaatttgcacaaaggctaggaaggaatcagcagctccagaatgaactaccacatagcaggttgtcagggccacctctctgagagaggaggccaggcagaatatccttaaggatcttctcatgttagcaacagcatggagacccaggctctagatctgatgctgagtgacctgggcaagtgaccttccctcctctgtgttttaatatcttgacagtttgatcccatccagagcctgtgttctttcctctgcctatcatactccaaattcagtaggtgtggctggaaaaaaaggttcacatggtcaagtacatttgagaaacatcgagttaagtggtttctttctgtagaaattttcagagagcctacagtgtgttcaggagcagcagacttgcagggaggggtggagatggtgtagcttttcccagtgcatttggctgtggaatccttcattttaggactcttattcatcctgggatcctagtgtctatctctgggcttattagtgagtggatgtcatccccaaggacagagaacgctcctattcctggccataactctagactcaaggcacttccctatctgtcatctagatctgatgctgagtgaccttgggcaagtgatgcaagattgcgagtgggcaagattgctagatcttgccttccttctttgaaggaaaatctagcaaaaataggtctcccttcaaatcggtgaagtgtggggggagcatcctgagtccacgggactcgaagttccttgagggcaggtgctatgtctaccttatttattgccagttccctggggcttagcttgggaccatctcttgagtgaatgaatgagtgtctattttgaaaagagacaggaaaggagataattggcttcatatcctgccccaaaccttactggctggtgacctttgagcagattgcttctgagagtccagtgccaccacagctctgtgtctcttttgtcaaatgtagatcaaggaccagatatggtggctcacgcctgtaatcccagcactttgggaggccaaggcgggtgaatcacctgaggtcaggagttcgaaactagcctggccaacatggtgaaactccgtctctactaaaaatacaaaaattagccgggcatggtggtgcacacttgtaatcctagctccttgggaggctgaggcaggagaatcgcttgaacccgggagacggaggttgcagtgagccaagatcgctccactgcactccagcctgagcagcagagtgaaactccgtctcaaaaaaaaaaaaaaaaaaaaaattaaactctcggtacttcagccataaaaaaggaacgagatcatgtcctttgcagagatacggatggaactgaaggccatcatccttagcagactaacgcaggaccagaaaaccaaatactgcatgttcttacttacaagtgggagctaaatgatgagaacacatggacccaaagggggaacaacacatactggggcctgttggagggtggagggtgggaggagggacaggagcaggggaaaataactaataggtgctaggcttagtatctgggtgacaaaataatctgtacaacaaaccctcaagacatgggtttacctatacaacaaatctgcacttgtaacccctgaacttaaaagttaaaaactctccatcctctcattcctaaagtgctgaagtgaggctcagatgcaaagacggttgtgagtgagtgctccttccacagtgtgaaacacttgacaaatgcaagggattaatcctatgatctgtatcctccttggttccctctctgggctgggctgtgatcacgtattccaagctgctgttgactgagtgctgacctcgggtcagggcctgtcccagaggtctttcacacattctgtgcacacttgtccagtaaccctcacagcactgtgagaagaagggattacctttgttttatgaaaaagaaaagtgaggttcagagaggtgatgtggtttacctgaggtcacacagctgtaaactgcagagcttgggatttgaatccagacatggttccaaaacatgtcttttctcttcattcccagcttattggctcccaggttaccaccttattctccccctactccgttttgggcagggtgttgaggcaggttatgcagggatgctggcttcagaggactactggcctccttgtcaagtcattttgctattttcacaaggacaagggcaaccatttgttgagcatctaccatgcatctggcattgagctggctgctttagatctgttattttcccacattaaatcctcacccaaaatctatgatgtagaaaaaaccactctcattttagaaagggacactgagctgggcgcggtggctcacacctgtaatcccagtgctttggaaagctcaggtaggaggatcacttgagtccaggagttatagaccggcctgggcaacatagggagaccctggctctacaaaaagctacaaaattaggcaggcctggtggtgcatgcctgtagtcccagctacctgggaggctgagtggaaggatcgcttaagccctggaagttgaggctgcagtgggtcaagattgcgccactgcactctagcatgggagacagagtgacaccctgtctcgaggaaaaaaaaaaggagaccaaggcttggagtggttatgtgacctgctcaaccgcatgcaattagtaaacaagcagccaagctgaaattccacccaagtgggtctgatcccagaagctggctatttccctggcttctccttcgtggccctgaatatccagccccagttggggaggggtgacctgtggctcctgggtccaacacactgggtctgtctgcaatagctgccgtggagacgtccccgcggtgcatcatgacctctggggctctccttccccagagccccgtgggccctgcccttggtgcctggcacactattactgcctgggaaacgctgaagaatgatgacagggctgtaagcctggcttctccaagtttctgcttgacctccaagggaccagaggaggagcggggagagcagggagtggagtggctgccgacatccacagctgatgcagggactcgtgtgtgcctgggcctccctctgaaagctgcctttggaaggtggtcacagccagtctgctcacgcccccagtcacgccacctattagcctggctgccctgggcacagtgacctctcccaggctggcgtcccctcccagggtgagtccatcaccaccagtcacagccgagctcctgtgcttggctttcaaggcccctcgcatctgcctcaagcctccctgtctttccagcctcctctattgcttattcatttatttaaaaaatatttgttgatcaactatgtgcctggcagatgttctaggtcctgaaaatacagcagagaacagaacagataaaatctctgctcttctgggaaaaattgacagaaagcaagttgacgaataaatgtatgatgttgggtagtgaaagggacttataaaaaaaaaaaaaaaagaaccagaccctccccctgccccaaggcatctagagatagaattcagggggtcagtgaagttagaggaggaaaaaaattatatttttatctcactaacctgtaactaaaatatcgcatttttcttcaattataaatgttggcaacataccacggtagtattagcagtgcctgtgactttgtcaccaacagaaatcagatatttcctatcacattacagttgttgcatacattttgaaacatcattgacactcatcactgcttcaaaattgttgtggttaatagaactgccacgagatcttgttatttaatgcattaataaagaagtgcatctagtactgtatcactcatttgttttgtaaatattttgaaaacgatttctatataattggctgccttgataaatctatgtattttcgtctatgcctttaaaatcattattctgagaagggcttcaccagggccaaggggtccatggccccagatgcattaactcctggagtggagatggatggggaggaggggcgggtttttagctggagtggtcaaggaagcctctccggggaggtggtatttgatcagcaacataaagtgggcaaaggagctgccatgcgaagatttgagtcaaattcattgcaggcagagggaacagcaagtctaagggctctggggtaagaaggaacaatgaggccaaggtggctggaacaaagtgaccagcgaagggagaagacagagaggcgcatggaccacacatgatgtaaggtctggctttggtgaggactcgggattgtattcccagcaaggtgggatgctacggaagggttctgagtcaggcgtgatgcattcagatttctcaattagaaggatccctttggctgtggggcagagaatggggcactgagtagtgggtaggaggggaagcaggaagaccaggagctaggggtctgcagcatccagtgaaagatcacgtggcttggagcaggctgagactggagaagtggccccattcaggatgcatcttgagactggagcctgcagagcttatgaggaactaaaagagccattaactttcacccttctgctttggcttatgccactcctggaactcgctttcctgccatctccatcctccagccagctctctccctggattcttcacccatgtggcaaaaactgctagtagcctcctctttttccatttccttactaatagcccccaatattacctgggggagcaatgtgcccagctcagaggccaattctcccagcctcctctgcagtgacgggttgctttggagatactggagctgtcatctggtggggtttccaggaacaggctttttataggaagctgactccttcttttgcccctctttttcctccctggaacatgaacaggatggttgaaggtcactttccccaaaagcattttgggaccatgaggaaatcacagtgaccttgaccctgatattcttgatatcaaggtggggctttatggagtcaaaaaattctaattaggttttgttattagcagtagaataaaattcccaccgggtacaactacaaatttaactgcttattggacatctccctcagaataacatagccccccagactcattgtgtctaattccgggtctgccgtctttgtctcaagtaatttcttttcggggaatccatatatctgtaagaaaagagaactaataggccgggggcggtggctcacacctgtaatcccagcactttgggaggctgaggcgggcagatccgaggtcaggagatcgagaccatcctggctaacacggtgaaatcccatctctactaaaaatacaaaaaattagctgggcgtggtggcgggcacctgtagtcccagctactcgggaggctgaggcaggagaatggcatgaacccgggaggcggaggttgcagtgagcagagatagcgccactgcagtccagcctgggcaaaagagcgagactccatctcaaaaaaaaaagaaaagagaactaatagtttaagagctgcgtctatttacccatctaccactgaccctcccacccacccatccttcatccacttctgttcatctgggcatgcatccattcaacatgcttttattgagcacctactatgcactgggccccgtgctagatggggggctggaggtatgaataacatattttttttttgagtctcactctgttgccaaggctggagtgcaatggtttgatcttggctcactgcagcctctgcctcccaggttcaagcaattctcttgcctcagcctcctcagtagctgggttacaggcgtgtgccaccacacccagctaatttttgtattttttagtagagacgggggttttgccatattggccaggctggtcttgaactcctgacctcaagtgatcaacctgcctcggcctcccaaagtgctgggattacaggcgtgagccaccgcactcggccaatatatcttattttaggcccatctgtgtctatataagcagaatatctctagaagaatccaccagatgctgggaactaggagtgcccctatggagggaaactcagcaccaggacacatgggtttttattccttttgaatcttctgaattctgtatcatgtgtatgttttcaccctctaaatgtttttaattaacaatatatgtacatctcattcggatcttcagaatttgccttgctcctgaaaggatttgaggcagcttgttagaatacacagagatgaatagacgcagccctgctgtcagggagctaacagtctcgtgggtaagagagatgaataaacaattccaatacagcgttgcaggaggggcagaggggtgcagacaacaggccacttggcatgctcttgagggatcatggggctgcactcagccactgcccctgagtaatgacctgacacggccaccttctccttgcccccgtctgggcttgaaaaccaagatgttcacatttggaacatacatgatggagacacccccgtccctccctgcccactcccaagttcaggcacttgtgctgagctgacccctaagtcaccaagcaccacagtgcccctgtgcccacatgtccaggtcgggggtggctgcagtagcacggcgtgttgtctctgtgtttctgcttgccctgcggatgaacgcacagagcgcatgagggaggctgtctccagcgccctgatgtccagcacagctacaaccccttttgcagcctcaggctgggaagtggggatgggggctgagggagggcaggagctgggatggcatggcggggacggcggagaggaccagccacgctgcttggagaatgtggtcttttcagagcagccctttgaaatcgagcaagaataactttaaacaataagatgcttctctctccccctcagttgttgcccaggcaacgccagagtgctcaacaactgtttagttttttaagaaaccaaatctccctccctttggtcagctaccgccaggaagatgaagaggcggtggcgctgccccttgcggcccattgtgttggacccgggtcagccgcctgcagcagtgacatttaaatctgatgctacatattatatatgaaccccgagccgcactccttcacgacttgtgctccctaaccggggaggcttcaatctcccaccccagacttcttgcccgcttgtggctctggcagtcctggggagtcacagctgagaggctgacctctgcctggcaaagcagctgggagctgaggaggacattgggtggtgatccgtccccaaccctctgcatcacggacccatgagagccctcatcaagccagcagtcacctcatccacccaggcagtgtttaacccccagcagctctgctaaactgtttttgaggggccttgacctctgcaccagcagctcacctgttttacatttgcctgctcaaaaggcagattggtgccctttatctctgtagggtcttccacaatccagcaagagacgttttttgttatccccagttacagataaagcagcccaggtgcagagagctctgaaagctgactacgagatgtcaggcacttccaaacggaagccctgatggccgcccacggagccaggtgctacctcaagcccattcctccagaagtggaaactgaggttccaggggttaaagtgatgaccagtgggtatggcaggatttggacctgggccagcccaactgcagggccttgcgtctcatcctacactgccttggtgagaccctgtgactcaaggacagatgggcagatctctcctggctcccaggcttggccagtgtgccctcctagagtggggatcggtgccccacttcgcctctaaggaaggaacatgataaactttggcaacatgaagttctgggttgtgtgtccttaggcaagttcaaagaaggtatttaaatcctcactttgcttatctgtagaatggggacggtctccagctggcagcactgttgtgaagaagcaagtaatgacagctgccccgtagagagagctgacatgttttgggcagtgtctaaccactccgtttaatcatcacagtgactccagactcaggtcctatgatcatctccattttcagatgaagaaacagacaccccgggaggtggagtcacatggctagaaactaaagccaacgaacataacccacagggacaggtcctggcacatagtaggttcaaagcggacattggctgtcttctcctaggaagataaatagaggggattctgtctcctgggaaacaaaacctgggagaaaggtaaatttagaaaaacgaaaccaggttagcgcaagccccttatccagctcggcagcacagtcaggatgggaaattggcttcagacacaacaaaaactagaaggggaagtctcgacatttgtgaaatgagagagcaggggtaggggaggccagggccctggactctgaggagggatctgctcttccctacccagggcttgaagggctgcacgaggggggacgccaccagcagaggctggggcagggccggttccaggcccagacggggtgagggagtcccacacctgagacagatggccttgccccatctgggaatccctggaggttgtgccgagtccctagcagtgacaggaaacacaggcagatgacaagctgccaaggtgcagggatcacatttcctagctgatgcttccgccccatctcctagggccctttctctcccaggaaactggtggacactcatcctccagttcccacctccccctgcagaaggctcctgtccccgcgtccccccttcctgcccccgccagcgcatctcgtttagcaccgctaaatggcaagcccagaggtacaatgtcggaaggggctggggtaatgaactcccattggcttccttcacgagatcactgccttaatttacgaggcctgagtgagtctcatttccccagtgcacgttgagtaattaactattaataaaagcattactgagttaaccatgggggcatgtttaattcatggggcagcccaggaacaggatgggaggcttgggctcagtgggggattcctcgcaaagcaaaatattgccagcaggatgccgccaggccctgggccccctacagtgggccaccttttctgtccctagccagagtaacctaatctcaggagggtagtgaggctgcctgccatcccaaccacagggctgctgagctctgggaggtgtaagcccctgctgggctatagggctgtctgcttggtggctaaagagctgagtgaccttgggcaagtcacttggcctctctgagcctgtttcatatctggaaagcagggctgttcagaaccaacagcttcccagggtggattgcaggactaaggagctcaagcatggaaaaggatgtggtaaatgacccaatgctctttactcgcatgaaattattttaggacctccctcttccccctcctcatgctagagataccactgttgactgttagggggcggggagaggatctacttacttgttcaaaataacatgatggaacaatcctatcaggatacctcctcttttcaaagatggatcagtagccccgctccccctcctctttccccatgtgcacctctggccagccacgggtgaacaaattgttacagcagccaaacacaccaacctcaagctcacgcacatctctgcaccttcgcatctgctttccccttgcaaggtacgcctcttttgtctgcttagcaaacttctatttagtcttcaagactcaattcaaaagggtcagctcttcctggaagtctgctctcctcctgacccagacggttgctccctttcctgtggctcccatacattcaactattatggcatctgtccatccaccatccatccatcatccatctacccatccatccacctatccatctaccatccattcatccatcatccatccatccatccatccacccacccattcatccatccatcatatatctacccatccatccatcaacctatccatctatccatccattatccatctctccatccatccatccatccatccttcatccatctacccctccatccatctacctaactgtccatccacccatccagccatccaccaacccatccatcgattatccatccatccgtccttttatatttgttgaacaactaccatgtacatctctgatcacacggttttgaatgagtctggctttccatagaccaatgattcttaatcttttgggggtcaaggacactgtctcccagaaaaacatgtaaatgcacacacatgctggatgctgctttcctcttcagagatccctggtcatccctgaagccagactgtggaccctggttgtggtagacactgtgatgtggtgttcaggtctccggttgggagtgaaggacttatttcctcagttgctgggagtccggcagtcatccttctttggggtttgtcttgaagaaactgccttacccaaagtcacatctccttccaggggcaggctcacttccaatgacaggtcaatgctgtggtgtaaggccatgagcctctcaccccaactcgggacaactctgaaaggtatctcagctttagagttccccatggggttggctgaggcttttggtaggactgccttgaagctcaacttcccctctgccctaacctgccgccttctcctttccacaggtaatttttccaagaccactttctaataaatgtcctgcactctaatctccatctctgaatctaattcccagggaatccactggattaaaaagccctgcagaagccaggcatggtggcacaagcctgcagtcccagcaactcaggaggctaaggtgggaggatcacttgagcccaggaggtcaaggtagcagtaagctatgattgtgccactgcactccaccctggaagacagaggaagaccccatctctaataaataaaataaaataaaataaaataaaataaaataaaataaaaagccctacagaagttccttgaggacagagaccatgttttaatgacttcgatatctccagcagcgatcaccggccagggcacattgtagactgtccagaaacactgatggaatgcatttgaatgcattttcctctggttctatgttctgtccttctgttgttccccagcaggagagttctcatctgacatccagaagaggacggccccaccagcaggatggtggtgggactgggagatgctggcctgtttctgggaagtatgttagttgccaacgaaactaaataaccatgggaacagacgttaagctaattggttactacaaagcaggggtgaagggacgtggctgatgtcagggctgtgcagttagggtgaaaactccatgggatggctgggagaccggaggctggcaggaatgggcggtggtgggagggagcagccccttcttacagggcaagtcatttggaagttagaacctgtaaaatccccactttagtttccgctagtggaaattccttcaaaaaacaagcatctgggccgggtgcgatggctcacacctgtaatcccagcactttgggaggtcaaggcaggtggattacctgaggtcaggagttcaagaccggcctggccaacatgtactgaaatacaaaaatacaaaatactaaaaatacaaaaaatgctgtggcgtaaagccatgaacctctcaccccaacttgggacaactctgaaaggcatctcagctttagagctccctgtactaaacatacaaaaaattagccaggcatggtggtgggtgcctgtaatcccagctacttgggaagctgagacaggagaatcacttgaacccgggaggtggaggttgcagcgagccaagatcgtgccattgcactccagcctgggcaataagagcaaaaactccatgtcaaaaaaaaaaaaaaaaaagcatctgttaagtgcatgctcagtaccagacactgcagcagagatggggatcttggaaggccagagctccaacgctggctcctcctctcatctgggcgagttatgtgacgtccttcctgctccatttcctgagtggtgatgactatgagccgagcactgtgtgctttacctacattattttatttcaccttcacagtagcttccttcaggtgtatgtattattattccttctgtagagacaaggaaacaggctcggagaagatcagcaacgtgtccaaaagcacgcagctaatcacagcaaagagagacacgtctctcactctacggcgtctgcaggttgtatccttagccatcgttatgcttaaccacttggaacttagtttccacagctaggaaagaaatacaatcagtccttactgcaccgggctgttacagattaaataacctatggcaaaggcctagatggtgcccagtgaacggtcttttctgttctttcttccccattccccagcccactgcctcatcactttcctgggctgggaggaaggctgactccaaaaatgaatgtctctgtccccaagtccggcagtgtctgccatgtagccagtactcactgaatgctgtcgacctaaatggatggcctgggagtccccaccctcagtccatcactagtgtgtgatgcaggaagctgcagcaagtaccatgaggagaattctcttggtgccatgtaactactctcaagccactgggattttcaggtttttcacagcaggataaagcagaaacagatggagacaatcccttgagccctcaaggcagaaaagggtaccggagtgaagatgaaggtatgccgggccctgcctgatggctcaggtccctcccacaggcaaactgcagcccattctcaccgccaccacaacaccaactgtggacgtcctcacatattggagccattaaccttccttccactgtgggcccctgggagaggtggtgggcaggtaagcacttgaaactcgaacctgcaggtcagtcctctctccgccccttctgcagaagcctcggagctggggctgtgtggggacagacaccacagccttggagagacaagtcacatcctcagcttcccctcaacctgtgcaagcaccgcgttgccatggtgatgctgcagccctgagatgcaatggctgcagacagcatgggtggttctagggctcaatgccgaggtggacgctgtctggcctgggaggccaggcgattgggtgggctgggtgggggaggagagggagccctcctttaggttcagctggtaattgctgctaaatgaagggctgtcattgaacccaacatgtgcgaggtaagggcccccgctctgcaccttgtaattactgcaccagacagcaacgcttgctccctgtgctgggaggcgggcagtgggggagcagacaggaagctctcatccacctgagccagcggggctctggcagactccccctgccgcccaagcagcctgcatcccaagcagcctctaagacggaggaggccctggcccccctccttggctggctcttcccacatcatccagctggagcacgagcctcctttaatcttggcctctgagcttgcggaatccaaggggggcagaggtgcaggagccagataagaggccgcttccaagcgcccttggtgctccacctccgcctgctgagtctgtgctgggaatctgaattagaggcagatctcggtctgactcctgagcacggaggctctgagggcctcgggctagtcaccgccccctcctggcttcagtctcctgctgcagaagtggaagttggactcgagaattcttgagggttctcctgctggtaaacttcagccagcaagctggatcctacttttgtaaatggggtttcactgggacagccacaccctgggtctgtgtcatctatggctgcttttgtgctacgatggcagagtagctgcaacagacgccatatggtccccaaaccccaaatatttactatctggccctttacaggaagtttgcagacccatttttaaagtattaaagttctcctgggcttaaccgaacgagctttagtgactccaacctgatggaaacaattttagaacaagccctatccttgtccccacccatggatacccactgtcctcttccaagcaccccttttctgccggtgtctggatagccgtggcagggcagctgggctctgggagccagtgtggtgcaatggcgccacctgctgtgagtgcctaggagcacttcgcctggaaagctttgtccccaagggccgggggggtctcccatggcccgggaaccagtttacaggagtagactcagtccacagcacatcagagctggggtcttgccccctcccttcctcatttgagagaggcctgcagtctagagaagacgtgggacttggccaaggaggagtggaaagcccaagccccaggggcccatgaagttccaggaggctgtgtggatgtcacgtgcagcacgtgcacacacagacgtacacagacttggatgtgaacctcagcccggccacttaagcagctctttatcttttccaggctttagtctcttagttgttaaaaggattaaaagaaatgcttatataacatttaatctgttactaataatgactcaatcttcaaaaggactctgagatagacattatccccatttcacagattaaaaaactacggcacagacaggttaggtcatttgcttagggtcacacagctagtgacaaagccagtattcaaactaggctgtgaaaacatgtaaggtctccagaatgcagtactcagtaaacattcatttatttcctgccagcaggtgcagtggggccccactggggaggggactggtgttctaacaggagcgagaaaatgaaggaggcctggcttaagaccagacatttgaagaaggctccaggcagggaaaggaaaggagaggccaggcccacactgtcccctccctgcccccacgtctccagcaacacaaggcggccagtggaccgtgaaccatttatttccaaactataaagaaacctgctctctgagaaaagacactgcccaggtgatgaagctccagcccctggaggtccaaaacccagtccaaactcagtccctttagaaagctgctgtgccttggaaatgagtctcggctgtcagagcctgggaagtggtgggaagaaccagcccactcccctctcctgctgcgattccagcgcagcttgggcccagctctggccagtcccaggctggcctggtgctcgccccttgtgtgaccaggctctgaagggaggggcaaaagtcatgagtccctggcttggccccaccacctggtgactcccgtccacagctcccagctaccatgatgagccctggcggcttgagcacagtgagtgctggcagcaggctggggagtggcctgcttctaagccatttgccctggctggtcactgctgcccctgggccacaaagtactcctcctcctcattgtcaccttcctcccgctggctgctccggagcagcagctccaggtcggggctggagcccagccccttcaaggccttggggccaccatcaccttgggatagagagagaccacagttacaggcccagtcgtggttttcttggtttgctctgatttgcatgtgtgctgagtcacccaggccccacccacccactctggagatgacccccacatcttcctagaggagtgacggcagcagagccaccgggcacacttcctgcatcagaatcactaagagtcacagggagaagaacagaaaacagaggcttctggaagggactctgggttacctctggaatgcagggctttgagggcaacgtggagggatattcccgagaggcagagggcgaagcccagccagttcaggaggctgatctgatcgcccagcagatgagctgccaacagcaaagtgcagacttcctgggggcagagaagcaggagggagcatgatcaacaggcagatttggctgcttgaccaggagggtggaaggtgggggcactaggtacactcaggtgggcagatcaagatcttactgaaatcctgggcccaggcaggcagagaggtcaggggacccggccggcttgcggcgctgtcccgccagcctccttttgtgagatgcaacaaaggaggtgcttgtcatggaattctgtcaggaataaaagaggcaaaccagatcccaggctggggaccagggtgtccagatcgcgccttatccacaaggataaaggacggctgccccagaaggcagccacagaagagagccctgagcctatgtgtgagaatgctgtgttaccccggactgaagacacaactggtcccggggctctctataaacagagactccaaacaggactggcaaggccgttcatccaagaaccacagccatgcctcagcatgcggctggccaccagaagacccttggacaggcctgcatttctgggtttaggcaacactgcttcaacactggtgtgtgcctggccaaagagaaaagtccctccctgcccctgaacagggaggactgttgaaatgtgtgggagggagaaggagaagtgagaagaggtatgagagggaaggacaggcctgcgaggcagaggtacagcaaggctggccacaggggtgctttctcagggtctcactagccctggccatggccttggaggacaccgccagtcaatcacggaactctttcctgatgagtctggataggggctgttcaacctgtggctccaggccactgcccagtgccagagttggcagtcaaggtaaaatgtgaatgcattccaggcctagcagagtcagagctggctttgaggcccctgctgtgcccttggggaggggcggctctccatctgtgtccctgtctgtgggatgggagtgatcataccctctcacagggctgtggtcaaggcagaaggaggggccagcacagcactcagcaaagtgcctggcacctaatggggcacttccttctcttctctgcagggccctggggtgcaggagctgggactgaagctgctggtgagaaacccctgggggctccctctctaagacaggactggcatcacgcccgagtctgtaccttaaaaatgccggcaatggagagagtgaggctggaggttctggagaccaggaggaactcagagaagcccaaaccaaaggcgagaatcccgccaaggaagaggctcccaagtacccgcaggagcagccctgtgtcctggaaacggaagattttctcagatgtggacaaatggagacctgaaagcaacagggagagagagtgggaggccgggtcctgggctgccttggccagcccaatgccaaccacacaagatcttccactgtagtagtgagttcttactgagacctgctaactgtctgcagcccagagaaaaagcatggaaggtataaagtgatcccacacagatggcctgagacctggggaaaccagggaagcagtgatggctgccagagcgcctgggggcaatacaagccagatcctagcaggatgatgcggatcctagcgggatgatgggaccctagcgggatgatggggatcctagcaggatgatgggatcctagcgggatgatggggatcctagcgggatgatgggatcctagcgggatgatgatgggatcctagcgggatgacgatgggatcctagcgggatgacgatgggatcctagcgggatgacgatgggatcctagtggaatgatggggatcctagtgggatgatgatgggatcctagcgggatgaaggagatcccagtgggatgaaggagatcctagcgggatgatggagatcctagtgggatgatggggatcctagcggaatgatggggagggctcgtctgagcctctggggtgaagtagaggggggtggccctgcatggaaagacggatggaagtgccctgcacctttggacagtattcccttactggtctgtggggaggggctcatggctgctgacttcatggggtctttggagctgtggtaactactgggctaaagaaggtagggcggctaccaagtgacgaaggaccaacagtgccccagcccactcagggaactccttggtctacatttcagccagttcacctacaaacagggacaaaattctatccctacaaacgttcattttaatctaggtcttgctagtacagagctgtgggacttgggctgagatgtgtcccctttctggacctcagtttccttactgataaaatgagaggcctgggaccagactggtatttctccaacccgtggtatcacttgatgaacatttcccaaaaagaaaatgcaaacacatggccccttgctccagaaacacaggcatgcacaccccctaccccaaattcagcttagactttcggaggagtcatggtccctccaacactgtccatctggaagaatgactcccggcgtccctcccacacgaaagtcctcgtggtgtattagcacagggtgaaggggggcccagaactgggcacaagagacaactgtggtagctggaagctggacgagtattttgagatttttggagggaagcaccaaagaaatgccgagtgacagtccccccaggcaaaacagcctcacagtgtaggacatcttgtttggtgctgggctcagcagaactgcaaaggcgtcggcaaattgaagggaattcggggaagagcagcataagtaatgaaggcgcttgggggattaatttaccagaaaagattaaaggagctaaatccatgcagctttgccaagtgacgactaccaggggctttcagatgaggttttgcagagatggggcatggtgtaaacacacgggaggggagggagagtgtggcgtttggtacaagggggcataatgaaggagtggggagagattttaaagaaggaaaaaaaacgaggccctgaacagaagtttcctggacaacggggcttcagaataattttcttggggaggttcaagacgcttcactgcttgaaacttaaatggatgtgggacagaattttctgtaatgaccctgagggcattacagacgggactctgggaggaaggataaacagaaaggggacaaaggctaatcccaaaacatcaaagaaaggaaggtggcgtcacacctcccagcctacacagttctccagggctctcctcatccctggaggacgacagtggaggaacaactgaccatgtccccaggctcctgtgtgctggctcctggtcttcagcccccagctctggaagcccaccctctgctgatcctgcgtggcccacactccttgaacacacatccccaggttatattcctggacatggctgaacctcctattcctacttccgagatgccttgctccctgcagcctgccaaaatcccactcaccctccaaaccacggcctgggaagcctttctgacttgcctgattactccagcatcttggaacaatccctgattccccattccttagaggcaagatagggtggttaagagtagggctggaccacttggagccaggctgctggcttcaaattctggctcatttacgagctatgggaccttgggcaagttatctttacttctctgggcctcattttgttctacctgcaaaatgggggataataatagtactgccacaccaggtttttggaaggatgaaatgagttcctatgtttaaaaagatcagaacagccctggtgcactttcagggctctgtgcacacttactgttactgttccctgaattttatatgtgctttctctgtagcgtttatcatgctggaccccaaaccatgcgcttccaggggagggactgcatctttgatctcaataatctctgcagctaccactgtgttgggctcagggcgaggatctgtggtctgctgcactgaggtgcccttgagagggaaggcccaacgtaccttcaaatacagcaaagagagggaagagccccaggaacatgagtggctgcaggtggaacatggtgtcgatgggattctggaggcctgcagggcgggggacaggcaccatcaggtctggtccggccctgccctgcctccgccctgcctgtgccggggttcctctctctggaggatgagtggcacgtgctcaccgagttcagccttctgcaggagcatctgggtgagggtccagcgaatgccaccgatgaacgaggcccccagcaccaaggcgaagccctccacgttgaactgtgtggacttgtaggtgaacatgaagagacccccggcgatgaggaggaccaccaggaccagtgccgcgcgctggtaggatggggagcagtggcagctaactcgggggtcttgagggtcaagggttcatcacatttggagcctggggtcagcagccatcttggctgcccctggggcaagaaatccttccacccttcagctccatcccagggggtcctggacagtccttgcccaccaatgtcagcatgtagggctgacggtcagctggtatgccaacagccctgcttgctctgccacactgacggctgtcctaggcccccaagtggtcccacctcctccctgggcctaacacacagggctactgcctcccacagcagggtgcttcctagacccagctctgctgggaccctcatcctgcagtgctttcacctttggtcattaccctgccacactggtttctaaatattctgagtattgcccatgtctaggtcccttctcagaaagggatctactgccacctggactgggcttgtctcctctgtcacacagcaggacaagccactgctcagactcccactttattcttagcatctgtgggggcaggaaggacacaagagacgctggggcctcaccagctcctccagcttgaagatcagagagaagatcaagatgaagaggacagctgaggatttggtcattgtgtacctggaagcaaaattacccacaatgcactgctggagctcagggctcagacccatcaccgagaaaggagcaggagcacaaatcactgagcgaaatgaccaaacagagctgggctgtcatctgagtgataagcgacctttaatcagaaggaatctctgactaagaggcctctggttatcaccagagagaagaggttacaggtctgacgttgagctccctgagtcctgttctttacctaaccctcggcagagcccaggagcgggaaggaaggatgagaagtaggaggacaagaaggcaggaacagtgctctctgaagcaaaacatcagagggaagaagaaactcttgtgtagcccccaggccacatagggctctgctgcggctgcgtgtaccacccaccagtggccacctgtctgtggccttgcagcctgccttcccctgctctgatgatggggttctgggagagctccctggcttccccacgctgcctggcaggtgggcacagcatctcctctgcgctgggcttacggaagaggctggcgacttcccggagagctgctgggtgccagggagaggctgagagagcaagggctggtcccagagtggtggagtggctggcctagcagccgggtgtgcagacaccccgctggacagacagacagcttcagcctgaagggaggcagcagggcatggccagtactcacagcgagacggtgacatacaggaagctccagttggacaagcccacgtcaagcgccgtcgccagagctgtgaagacacaggcacccacaggacagcttgggaggtccacactctgctggggtgggctggtaccctgaggcacctgagtgtcccccacttctgaaccatcccggtgcctcctgtggggcccttgggccttcttttccaccagcaactaaagggttaatatctggcccccaaaggtcgggggctgctctagcattagggctggggcccattccaactggctgggccggtatggtttccacaaacactccggcgagccccctgagcggaggtattaacctgatctggttgatcccttactggaaacccttttccctcaggatggaacacaaactcctccacggggaatccggcctccaggacatgacccctgcccaccctctcagttctcatttttcccacttcctctggccagcaccgggttctcagtatcctgaaacactttgagttcccttccagaccccacagctggcactaaatctccctcgggccacgagggcccctcctcccagggccaaccagtcccacgcatccttcagggctctgcctacttggcacctggcctaggaaatcttcctctaccagccatgggccccggccttgggttggtcccctccctgggctccgtagtgccctccatgtccgtgtcacagccctgcgagggcagggaccctgcctgctcaccacttatctccaggcctgagggctgcactccaggctcggtgtctgctggcaggagagggagctgcggggccgcaggtgcagggggggttttgtgggtgtgtggtggggcagtgggaaggcacgcagtgcacaagaggcagcagcgtgggtggtgggaggccaggtcaagagggcagaggaggaacagtgcaggaagaggggagggacttggcttccagacatgcgggtgtctctcttgttctcatcctatggttccccagcccctcttcctgctctgccctcactgaggtcccccacctacctgtgggagccactcttctgaggtagtcggcccagctcagcaccacacgggccctgtggctggagcactgaaccagcgccctggacagggcggagaagaggaagatcacggccaggtgcagcatcgtcatgaagagggggaaatggaagctctgtatggagcccaaagcagacaccccggcttggtttagacagcctgccccccaccggctccctcttcctcttcgcccctctgctggagtggggctcattcggtggttcatgaggaccttgctatgtgtgtagggcccttagttacggtatcatcgcttggaatgacagactcttaggtcacgaagacaggtggcagccaagagactcaatcctagcctggtgctgtctccaccatttcaacacacctgtgagctacctgcccagccttcctcacggcctatgcccaagtgagagccactgcggcccactacgttgtatcacttattaaaatattgaaatacttctctagtggggtaaatagctgctgcttgagccccagtttccccagctcatcccttcacaccccccgctctccttggtttccctggatccaaacactgaaggggaaccctggcacggcaggcttggagggccctgttccagcccagccgtgactggcttccagttagactggttgaagcttgtgccttcctgttaaacatgaagggcaccgtagccatggctctggccaccttcatcccagcaccccgccccagcaaggcctcctggtacctttgtcagccacttgttgtagaaggtgatgccgatggagaagcagtagtagagaagcaccagccccagggtcaacaccgccttccacaaaaaggccacatcgagggcccacctccccattcgtggcggctgcagcaccggagctcctgagtcagcgggggcaggcacccctcttgaatacaatgtgcaggaagagccggtggagttagaccacagctttcaccaagaacgtctccaggctggaggagctctctgcagctccatgattcggaaccatcagcagagccccaggcagagtcctcacctaaggggctggtggctggtgctgacccttcccatggttaattggatgcagcgctcacaggtcccaaggtctgctgctggggaaaaagggccgctctggagcctcaggcagagactgtgcttctcgtagccatgggtgcctctgaaggctgcgtgactcagggctctggaggggctgcccacaacggcacaggcagtcccagagacccacgtcgtgtctgctgtcttgtcacctcaagctattctccatgaactgccaccaaagtgaccttttaaaacacaaactgatcatgtcaggccactgcttaaaacccttcagcagcttccagtgcttttctgataaagaccagcacccttctttcggctcccatggcctcatctggccctgctggtcttcccagtctcagccacaggctctccaggacctggccccactgggcgcctttcagctccccaaacacaccagctttcttcccgttgtctgaaggaaatgaacgaacactgcacccacccttcagtccttcatcaatcctacctatcttcagctcagaggtcacttcttcagggaaccccaccccatcccctgaatcagtcccctgagatacatgttgctttcacggctctcctacttctctttcatagcacttgtgcagggtgtgatttgagtaatgtctgtcccctgagaggctacgagcggcacaaagatagggaccagtaagaccacactggccttacgcacagctggtgtactttaagttctccgtctggtttgatgactgacagagagcaggcatgcgattttcaggggactggtctggtctttaggggttaaaaatggagaaggaaaccaacactctaacggctggaacactgtaagaccaggctgtaaccactactccctggaagcagagcctgccttacggtattgccaaatgaaaccactcccagcctccctgtcaatccagccaaccctgatgagtgcccggagcatgccgggtagacctgtctgtgcctggaggagcctcaggtccagtgttatgtgatgatacctgctgcttcatctgggtgcccccctcaaccacagatcctcctttgagacattcccatcctattgaaacgccaccttcttctcgaagccttcctaggcttcacgatcagacacattctccatctcccaccccaacatttctgaagggagcagttacattccattctgcactctggaactcttgttactatttcccctccccggggcaaacagggagctggctgtgtccaaatgaatctctggggctacagttgtcttcagaggagctttggaaacctgtggcggtattttggggatatgctcctggcgttcagtaagcagggataaagaaggggcagtccacatagccaattactgctctgcatcccgcacgactttgacatccatataggtgaaagattagcttataattatctgaacctagaatgtaactctgtttacatgtaaacacagtgcagtgtttccatggttctgctgtgaactaacacttccaagaataagacgcctatgtacaatgaagggagactgaaaatggtcaaaattggtctcaaaatggcaccaaaagtgtccattctggaaaaaccacatcatctacagcaatggcactagtggttttcgaggtgcgacacaacacggctgtgtcagtctgtgtctgtggccatcacactcctagagggtccacacagaagggacagcttcactgcaacttccagcactattgtgcccagaaacttacatattgaaacatattttgttttactatcaattactttccttttatgttatagggcatggttatttatattttattttattttttttttgagacgaagtttcgctcctgttgcccaggctggagtgcaatggtataatctcggctcaccacaagctccgcctcccaggttcaagcgattctcctgcctcaggctccctagtagctgggactgattacaggcatgcaccaccacacccggctaattttttatatttttagtagagatggggtttctccatgttggtcaggctggtcttgaactcccaacctcaggtgatccgcccgccttgcctcccaaagtgctgggattacaggcgtgagccaccgcgcccggctgcatttgttgatttttaaaaaattatgtgtaggcagtttttattaatcatatgtttcattttagggtaataaaagggactgttacaaaatatttgtaataaaaaagaggtgtcagatccaatgagttgagactcctacctgacctaatgcattctcattccttcaaatgccttctgtaagctgatgtcttcccaatatatgccccggctctgattcatgtgaactccagaagaatatccaatgcctacctaacctcttcttcccttagatatctaatatcaggcatctcactcacatctagagtgtctgaaactgactcgtgttttccacacccccatttcatccaagcctgctcctcttcctacttcccatcccagcaaatggctccactactctcctagttgctcaggccaaaagccttaggctcatctgattcctctcttccccttagcccacattcaatcaataaataccgtcagctctatcttcagaaatatcccaaatatgagcacatgtcctgaactccaccactaccatctcagccaccatcctctccccaaatgactgcaggagtctcctacacggttctctctacttctcctgcaaccaccaccatcaggctcctccaacaaagagggcgcatgggcctcaaacatacgtctacagatctcaaaacccacactgtttcctctacgccagggtttctcaacctgggcgttactgctgtttggggacagataattctttgtgagaagacccatcctctacatggcaggatgtttagcaacatccctggcccatacccaccagacacctgtcacatccttccccccatcccaagttgtgatacccaagaaatgtctctagacactgccatatgtcacctgaggatcaaacctgctccctgttgagaaccactgctgaccctgtcctgtgacaggcactcacaggacatgctggcactaacagagctttcttctgagcactcttccctcatggctcctcctgtggcttccaagccagggaagtctgttcactcttctgttaaccaacttcttgcagctcctgcttttgctgcatttcctgctgcagcactgcaacaccgcaacaccctccctccactgttcaaatgctgaccttccttcacagacctggcccagttcccctgcctccaataagtccctatggctaccccgcctacaagaagcactgtctcaaatttaacttattttcttattgggattcagaaggtcacctatgcccaaacacaaagccaaatctcagctagaagggtccctggagatcatctaggcacttaatgagcatttatcaagcactcctgtaggcccaccactggagacacagacgtgaaactgaaaaggtccccacccttattttataagggaaacaagatttaaaggagtaaacaactctttttgaaatctcatttgctcaggaaggaaagtccatattctgccccactttccacagagagcagcttagctgggggcagcagtcacatcaaggtaaggctggctggtgcatcactggcacacctgcttccctccatcttcctaactgtaacttgggcagcatggtttagtgcttaagagtgtgggctttggagttagacactgagaatcaaatcctggtgtccctactcactactgtgtgaccctaagttacttgacctctggactcagtttctccaactgtaaagtggcatcaggtacagcattaaatgctggctcatggtagaggcttactcccctcctggtccccttaacagtgaaacttccccagaggaccccgcactgccagtccaactccttcaccccctgctctcacttcagcccatctccactgctccaatgagtcaccacaccctcctccctgctgccccttcgaaggcttagtctctattctttttgttgttgttgttgttttgagatggagtttcaaggctggagtgcaatggcgtgatctcggctcaccgcaaactccgcctcacgggttcaagtgattctcccgcctcaggctcccgaggagctgggaatacaggcatgtgccaccatgcccggctaattttgtatttttagtggagacagggtttctccatgttggtcaggctggtctcgaactcccggcctcaggtgatctgcccgccttggcctcccaaagttctgggattacaggcgtgagccaccgtgccgggccggcttagtctctattcttaccttacacaatggatcacttcctcctcctagaaaaaaccttctcttgggtgccacgataccacattctcctggtttttcttctgcttttctggactccttattggtcttttttgctggcaccttcttgtcaactcaatctataaaaattgggtgcctaaagcttggaacctggcttctcttctctcttaaatcttaccctacataatctcatcctacccaatccacttgccaatgatttctaaattctttacatcagccctgaccttttctgtatcagactcatatatctaactgcctatttggtagctgcactccaaatatctaaaacttaagatgccctaagaagatttcgtaattatttctcacgctcccaatctatcccaaagtcatttagtaaatgccagcataatacacttggttacttaagccaaaaccaaaaatctatgatgaagtcatctttgaccacttatttctgtcatttctcaaatcctgccctgtcagttccactttcaatacacttcttgacccctctacttctcttcctctccattcccactaccacagtctaagccacaattatctttcacctgctgactgccactggtctaactggtctccctgtttcctctttcgcccctaaggcctggaatctataaagcagccagagagatggcacacgaaacagatcatgccctaaggctaagcccagctcctcagcctggtccacaaggaaggcctctgtaacctcattcttctgccactggtcccagcacccgccacagcggccccctgccacgtgtcaaacacatcaaacctgtgtttttctttacttgctgctcttcctgccttcagctcccttccgcagacctccgcttggctgaatactttctccaatgccccacccctcccaatcctcgtggcactcccacctctgacgtttccttgtttgctcacgtgtttactgcccgccccaatcccaccgcgggaagcagcccctcagagggcagggccgtgtccgattccggcccgggtcccgcacccaggacgtcgcaggtgctcaggaaataccagatgagccggcgtccggcaggtgccttgcaggagggcgcttggagacccctgccccctccacagacggcgaaactgaggcccggggaggggcaggggcgtggcgtgccccatgtcaacccgcgcagatcccgggtggggagcccgcttcccttctccagccccggccccccagcctctgggagtgcgccgggaggccggccgcacacccactcacctcggccctgggagctccaggccggaatctccccaccggaagtgcgaggccggatgccgccgccgaaccgcggcacgggcggtaacttccgccggaagctacccaggggctgggcggagccggggcgaaaaggcggggcggggcagcacgggggcggggcgtctgttgtggtcgggttctgaggtggtctggtctttctgaggtacagcgtagttttgtcctccgcgaagtccctcaggctcagagcacagccgtgtaattgtctgcgtctctcccgcgctcaatcaggggcttgctttggaaccccggtgcctgctagtgttctgcatacagtgagcatccaaaaaatggtaacttgtttacttttactgaacaaattgtttttcttatgtccagtctaatgctgggcaaccatggaatgaaccacgaagataagtatctcatgggctttttcttctgggagctcaggccagctggggccattacaacttaaaacttgggcgatccagaagtaatacgaaacatttgtgaaatattttctgtatgaaactttctaagaattatctcaacttcaataggttgagtagggagagagcatcccagatagaggaaatgggagaatcctaaaggagggtgagaaagctccagccgtgcctggggctcacaggttgtttgtaactgtggtggttaaagtagccaagaggcaggttgcagtggccccaaaatgccagcctagggagttcagattttcttcatcttgcgggatggattaaaagggcagcatttgcagtcaagaacattaggccagggcaagctagggttgcacattcagacccagttttgtgcctttcgccctcctctagcctcctcctgggctctctggcagtaagaccagctgcaaacatggatccttacaagtgactcagctgggatccctggcccctctgaacagaaggctcaaggccagagtgtaagcagtgttttatgcaaactgcggctgtcaccgccgccagctggcatcatgcaggcattagttcattcagtgcttaccaagcacctacaatggtacccatcactgcccaaggtcttggctttattcagtcctcaggcttgtattgcatgcactttctatgccttttgaaagagcctgtcctcacacccttctctctcagaggcaagagatctattttcatcaccaccctcatttaagtctcccagctaccaaggccaaggtttggagcaacagcctaaaacaccagctggaaggctgggcactatgcacaggcaacacacagggtaaagagcgtgtcttctttgtaaggcacaagtactcgagctgttccctggctgtgtccctggcagggagaagagggaggatgtgttcatgggggtgtacagtatgccttaccttgctgtacccagcagggttgagcagaaaacgcttcgtcccagtgcagcaatctgtgaacactcttaaccagcaggtgtgtgtctgtgtgtgtgtatgtgtgggaggagcgaatgatgaggaggaagggactcttggaaggtgactaagggctccagctggagctctccagagtctcccagatacatggagatcaagtcttgtcaaggtgaaatcttcaccattgggcagggggcaagtacagacaaacagctgttaacaggaaccacagtttgtacatgaaagagtatttattgaaaacatggttactgacaggaagctcctggctgctctctggttacaatcttggctcacaactggaagtgttacatactttttacttcccctcaattttatttttccccaaggttccatcctaagataggtagatcttatataaatatatatacacgtctgtataagtatggcctatagtaatgaaaatatatagtacactcttcattgggtagtacctaccatgccaggccaccaatactgaatgccaatgtgctaacgtatgtccagggagagaggctgtgtgtgtggtttacaagtgctgcagcaccagggaagccccactggcacaggtgtggcctcagccggcctcagccagctccctgaaatcatggccaatggcagaaaccatagcactaggaagggaaggccaacttcctggggtctggaaggccaaaggaaagcaaactggagggggctgcaattcaggttaggggagatttctctctgaggaaggaaaaggtattaatgtgggggaagagcagtagaatctagtgacctcaccacagtctaggcccaggcctcagctgggttttccctgcagcgttcctggagacttaagagggcaggacttggccaggaggtctttgacttgctgggatgagactgagcgcttgcagggagaaatttccgtctgctctgatatctgtatgggccagagagatctggtggctctaaagaccagagatgttagagccaacctcagaagcagcaacgtcttggcaccatatgaagctggagtgagccctcatcaaaaaagacaaaagcaaaagcctcaggcttgtactcagatctaagatacaggtagtcacttcaaggctctcaacacgcccaacacacctgtcctctgcaggcagcctttcctgggccagctgttgctcacgtggggatccagctgatcagagagcaggctcaggaggaaaaggtgagtggctgttgttaaatccatttcaagaagcagtttcttggactggaaggcaagggcatctgctgtttgttcctcgtggcccaatcccaggcttcatggtgatggagtgggcagagcaccctgccttcatgactcttagtagacagggaccaagaggaaactctgggtggtccgaggtgggtttgagaaatggctggcatttactggccaccaaaatcactacagattctgtacaagcaaaagacaaggcaccagaatgtaagtgtttctcctgggcccaaaatcccttctcctgggtaccgtcgtttctggctccaggctcagccatagtgatagacaaagtcatagctgctgggctccttggggatggggggtggggcttcgggaatctggatgttctccaggtccaggagccgcagcttcatctccatgctcagcagggtgtccaggtcactcttggtcagctcactggacatgtccttccccagaagggcactgaggccatcaatccagatgcagtactgtggggagcaagttgcaaaatgtcacatcgtgacccctggtcagcaggagatcctgccaaggtctcttttctgatggggctcacaacagttccttttggaactaatcagtataggcaaaactgatttggaatgatagcaaagataaattaggaggtgatccttcactttctcaagagatctggtttttataaggggttttatattacaactccttacaataatatgaaggagaacctaaaaatgcaataaacgaatacagcaaaatgagatctgagtactggggcatcatctacctgaagttacccaaaatcagaagcgagagaagggaaatatgtattaggtgaaaagaagcaagacacaaacagaagtcactgtgggatctcaattttgtgccccgcccccccgaaaacaaaattaaaaataatccagtcaatacatattaaagagtaaatactaaagaaatggaactggtgggtctcatgctaagagggggtgaccaggaagccttctgatcccaccgctccctgactcttcctgcttcctctgctgccattttcctttttccacaccgttgctcacctggttccccacttgcttgttcttcatttcctctcaaccaaattccactagcggcagctcaggccctgcccaagtgtctcctctgccagaagtcccacctctagttcccagtgatggctctcagagctcaccaggcacatagggtctcaaatgcaatcactcatttaatatctagtatcttccagtgctgcagatggaactacagggcccttgtcagaaggaccagttccatctggcttcaaagtccacactggatccattacaacatgtgaccaggagcccctaggaggaaggatctgtcaagttctcttgggtagctgaccacagagaaactgaaaaggggagaattttcccagtcccaggtaaatgactcattcctagttgaccttatctttgtaatgacaacctatggctgctgctgaagagtaatgtggagagcccagctcacagataaacaatccagagtgtgacagatccttggcagccacccaatgcgcctggaggaacctcaggtccagcattatgtaatgatacctgctgcttcatctgggtgcccccccaaccacagctcctcctttgagacattcccatcctattgaaatgccaccttcttctcaaagccttcctaggcttcaatatacactgcagccacccaccacaggggactttcctgttttgctcattcctgccaccaactgaagagttacagaaatagctctgttgtctaaggcagcgccacactgctcacctcatatttattaggtgcgatgaagtttaaggtctcatcagggtcatacaggatggagaaggccaattccaacacctcctgaaggagaaagggtttaaattagagcgatggaacagcctggggtctgcacatcaagatcttggccaaagtcctagtgactcggcatcatcaccaaacatgctgattcagatgaatgtcatcaatgctcctaggcggccacaagtgtggctggagatgaggcccagcataaatcaaccttaacttacccactccctgcccaagtcacatcaaagatgttgtgatatttttaagattggaaaaaagtcattttcaacactcagaaccctggaaggtcacgatccatgactgtaagttatcctaaaagtttttatattaccaagatgactaacaacttctatcgtgctgtatttggcataggaatgtcttaacaattaaaaaacaaaacaaaacacacacacacacaaaattggtcactgttgcatgataccaaggaactaactcattattttgaaagtaagtacataaaagaagaatcagcatttattctcgtttcctatataaactgtaccactgggaaaccaatagtagataagggcaagtttcatggttcagctcataaatgaaaagcaatgactgcatcaaaatatcatgagtttgcaaaccttagttgactgatggaatgaggcactgagcttcaacagtctgctaattatcacaaaaggagagaccaccagacgttatgtgcctcttgatagaacataataccactgatgacactggccaggaaaaaagttaaacctgaactggatcaaacctctagatccctcttccaatgtacagatctgggacagaggaacaagttaaactgtaccacggggaaacaatcagcaaaattcagatgctaggaaactaccaaacaagcaatctggttcttcagctaataaactgcaaaggaaaagatggtgggggatgggggggcgggggaacttatgaattaagaaacttaaaagaccagtcttagactctggtttagacaagatgggtatgggggtgtgtgtgtgtgtgtgtgtgtgtgtgtgtgtgtgtgtgtgtgtatccatataaacatttatatatctgtagagaaattatgacatttataagacaattggtagaaagtcaccatcagtggaatatttgatctgaaataactactttcatttcctgttatgtgtgctaatggactggtggcaatgttatacactatacgatgtacactaaatatttacagatgaaacagtgtgatacttgggactttcttcaaagcgataaaggagagaaacaagtggatgggcagaactggccatggttgctgagtctgggtgatgtgtatacagaggttccatctatttttgtgtatgttcaaaattcttaataaaacattcaggaatagagaggggaagatgccaagaatgcacctggaaaaaaccaccaccaatggcactctccaagtatcactgggccagctactcaaactggcctctctactcaccttgttctgtttcagagcacttttctctttcatgtggggacaatctttcccagtgacaatggccttaatgtctgcaacaggaactgataaatgatgggaattagtctctggaagttcatgctgcaagctggtcagtgcctacatcagtgctggaagggaggtactggggcagatgcataggaagcctcagccccaaactccaagggctgctgtatgagctcagtgagggtggtggggaggatggccttgtactgttccctccgtcttggtcactcctgtagaccacagcccagtgaggctgtgtcaaagctaactgagggtcacttcagggctcttggatttatatccccaaggaacgggaccttggtgactcccttcccctctccttcacaataatggcgatgatgatgccatcatcgccaacagcagtggcagctgctaacagttatgctgactacctgccaaccactcttctaagtgctttgcatacattactcatgcaatcctcttaggaggaaagtgtggctattattcccactttacaggagaagaaaccaaggcagaggggagaacttgcaattaattagaattcaagttaattaggagcaaagccaggatttgaatgtgggcagtctggcttcacagcttctcctcttaactactgcctttcgacttagtcatgtaccaccctttacagtctacacaatacattcacacctgtgaactcattgtttctccaaaccaccccaccgagtaggccaggtagaggaaatcgctgacagataaggaaacaggtccagagaggtaacaggtacaagcccagatgatcagctacaaacagctggactagaactcctgtctcctgacaagtccagcaaccatgacacatcaacagagaaatgaacctacttttctcctgcagggattcaaatgtcacctccccttgtgggttgtcatccaagtcaccatagtgaaggaccttgtggttcagtgccaaccggcagtaccagaaccgttctggaacacaagggaagccaaacaggtgagcaacgacagtactgggaaaggcctgggcacaaaaggggccatccaggcaggctcttcccggcaccaaggattgccccgtctcctctcaccttgccttcggcggttcccaatctttcggaagctgctgccctcacagagccggttcaggcgctgctgcttgatcagctcaaggatctcgggctggatcttctccctcagctccctggggtggacacacactggagtgagcggaaggtcatggggacagtggagctctggaaggaaagcagagctggcagccacctcccccgccagcctcccctgagatggaacttacacaattggcggggactggaagtcatcctgactcatcctctcagactggcgcagtcgtagaatctcagagtaactcaggctacgcaatttgctcttgaactgatccaaagagttgggtttggagggcaaagctcgagtgatttgctctcggacgacttgcataacctaagaggagaagaacccagccaactcacaccactactcttgagaaatggacaggcctattatggagcaccaaggctctttcctgccccagggtcttgagcagggcaggcactacagacatctgctgggtgagtaaggtataccttcttagatggttattcaggtcacatgactgacactgatagatgctttatttcccatatatttcaattggtcaatggtgtgggggaaatgagcatggatttttgtagtcagaaagaaatgggttcacatcttgactctgtcccttcagcaagtcacttaacatccttaggtgtgcatctactcatctctaaaccgagagaaaggaagacacatctcctgataggtgttgccataaagaatatgagataccagccggttgcagtagctcatgctttgggaggctgaggcaggcggatcacctgaggtcaggagtttgagaccagcctggccaacatggtgaaaccccgtctctactaaaaatacaaaaattagccaggtgtggtggctcacgcctgtagtcccagctactcaggaggctgaagtagaaggatcacttcaacctcggaggtggaggttgcagtgagccgagacagtgccactgcactccagcctgggtgacaagagtgaaactctgtctcaaaaaaacaaacaaaagaatagaaaggcaagcgcagttctggcacgctgtggtgttttaaaaaaatgcattggtccccttaaaacaactattaaagaaaacaacaggataccacactgcatgcgcagtatgatcttgctaatgaaggaaaaacctgtaggggataaaaaagactagaggaaaacaaaaatgtttgtcactggatggtgtaaatacaggtaactttttattctttatactttccaaattttttatgatgagatgatcaacttcaaaacactcgacccctagatgatcagcttttgagggcctggcacaacagtgctctgcatagagtgaggactgaaagcaccgagggataactatcgattaagtacccagggtgtgcacatcatgccagtccactcttctctcctaaccttcccagttcacaaaactacagcagtacctgcacagtaagcactcaataaaccacagtgagtcttctaatgcttatcctcctgacctctctggaggacgggagggacaggtgctaacttcaatggacaaatgagggcctacggcaccaagtggaagacaagctcaaggtcacagagggagcaacaaccagatggggctgaggctccccagtgcctcagtcttgtgactcagttctgcagaccaagctgcttttccagctcagggattctccaggtgccagccagctgtcaaaggctgtcgtgtgatggtctcctcccgtgggcctcagagcagcccggagacactgaccttgttgaagtcctctgctgttgccctcatctccttccaggtcttgttcaacagctggatgcagattccaaagagctcttcaaaggctcggtcatgggtaaagaacatcgggtggtagtcattgcgtccttcatttgctgtggaagtgaaaaaacagggagaagatgaagcctctgtccacaagggcctgggagctcatgtctggaaactttgcaccaaagtcccgaggaacaaaagcagcctaaggcgcgcaattaacagggagcgtgggatgggcgtttctcacgtccttagctttcttctccagggtgcattttcttgccttccctctaccctgttacagactcagccagcccttacccacaggcatggggtagctttggaatatgattcaaattgccagttcaaacaaagcaacaaccatgattcccataaataaggataagatggaattatcagctgatgcagtgatttaaaacaaaaaacaaaattaaaaacccacctaaggttgtctagtcccactgacatcttttttttttttttttttttaagatagagtctcactctgtcgcccaggctggaatgcagtggcatgactatgctcaccatagccttgacctcctgacacagtgatcctcctgcctcagcttcctgagtagttgggaccagaggcatgcactaccagttggctaatttttggttttttttttttttttttttttttttagagatggggtctcactatgttgcccagactggttttggactcctgggctcaagtgatcctcctgcctcagtctcccaaagtgctgagattacaggtgtgaaccaccacgcccgaccccactgacatgtaactgtttataattttgagtctcactgagctcttgatgacaaggaatggctgaagaagagggagctgcagagacttacgtagttccccaacctgcaggatttcacagagcattttggtgagctcaatggcactgcggccaaaggggcattcatgtttgtcttcccggctactgttctccaagacaatctgtcgggggaagagaaagggaggattagggagatgaaggaggaaggcaggagatgtggcaccaggactgagaaggccagctcccctgcctttacccggatgtaggtgtcctggtggactttagccaagtacagcatgttgtccaaggccagcattccaggaggagtctgggtaaagtccatggctggattgatgtggttctagagaaataaagacacccaatttgagatgcggcagtctccgtgtatgcagggacctgaggggatgccctctcgcctctcctcttgatgctgctaccactcagcacccacctctgtcctagctcttttcacacccatcaccaccactgaactgtgagctcttgagtgctggacggtggctgcctcaccatgcatcccagaacctacttcacatgctgctgcacactgagtaggtacgcaagaaatacttcttccagttaaccccatcctcaagccctactctatcacaaaatattcacactagctttgcaaagaacctagcagtttgggtaagaggacaggtcccctctctacccactctagctgaccgcaacccccctacagatggattcgtttcacagggccaaactttgcacataaactcacagactcaccatcaacaaagcaaagcaagcattaaagctccaccagcttcctaactgtcatctattccagggccaccatggggttggttgtcagagctctgtctgggtgggaccattgacttcccatcaggggagagggcctaccaccgtctatgctctgaggtacttacggtaaatcccagcattttgtagtcctttgtgtacatggctttgcgtttttcggtcccactcccaggggcattgctaggatcagactctgcgtcaaatgcaatcctcctcagttcaaatatgatgtccctttgagcctgcgaggtgaaacagacagtcagcaggtgaatcggctaaccaagggagcaaggaaaagaaacagtgggtcaggcttttctgggccaaactttggccccaatcaatcccttaggaggcatcacctctaccacagcaggacagaaatgggcttggctcatggtgcagatcatgctagattttctagggcagatgcaaactacttctgcagacaaagaccaagcacagtgcctggcacatagactaaggctggactgcaccacagccatgagaaaacagctgccccacttagcacctacctggtcattggggtccatcttggtcatcatcctttcttccagaaggttaaaggttaggacttgaaggacatatagctgatgggccatctcagttttgatggggcggttccctcggatcacatgctagaaaaagcacaggcagggagcaggggactgaactgatctcttttaatgaagggccacatccatgctaaggaaaaggaatgtatgttgggaagggaacagagctttcctcccacacacgaggacttcatattctagaaggcgatggagcatgaatgggcttggttcaggcagagatgactcactgcaggcctgaaaggcgccatcccttcctctgcattcccctgggcaggggaagcagagtgaaggcaggggctatacccaaccacaccagaaatgggggaggctactccatcaaggctatgatacagaacattgggggctggaccttcctccaatcaggcatttcacaggcctactaaatgcaaaacaatagatggtgtgcatggaggcagagttgtttttcccttagaaaaataaaatgttttggatggcttcacccagcagagaggctttgggaaaggccattttctttcaatgatactgagatagcaacacaaaggaggaacagttcactctcctaccagctccctcccacggccctctccttccttccttcctctcacttgtcctctcctctctcctatcactctgtccctgctccctgtgccgcccacaccatgtccctctccctcctgactctccctccccactgtctctgtgcccccacattcccctgtcggttcatcacctcctcctttgtccctctgatgcccacaccccactttaggtcccctggtcctgtctcatgttctgtctctgtctttctcttgcatgctatgtctccctcggtctgtcctagctgatcaacccttgattacattcctgtctctcaccatcctgtcctcactcccacaatatcctgcttcccttcttgctcccttgtatttgtcactccctctgtctcacccaccattatgaatcctgtccctcttggttctttcttgcccaaatgaggctctcctccattttccacatgtaccaccactatgtccttcaatttccctactcagtagctctgtctctagggctgtgctgtccagtatagcagccactagccatatgcagctatttgcatttaaatcagttaaaacaaatttaagttgaaaatttggttccttagttgcaccagccacattttaagtgcttagtagtcaccgtggctagcggctacagcaatgcagatacggaacacttccattaacagagttctactgaatagcaatgctctagagcgctctgactttagagaggtatctgactcagtatctttttaaagctccttctaactttggatcagctctccctagagtttgctctgactctagatcaatctctttagacctgtgaggtccagtttggtagcccccaggcccatgaaatgttaggccaaactgagaggtgctgtgagtgtaaatgcataccggatcttgaagccttagtaggaaaaaagaaaatgtaaaatgtcttattaataatatttcatatttattacttgttgaaatggtaacgttttcgatatcatgggctgaataaaatatattattgaacttaatgtccctattcctttttcatgctgctactaaaatgtttaaaatcatgtgcatggtttgggttctatgtccactggacggtcctgctctagacctcttcccctactgtgactccagtgctctctcctttttctagctgtttctctagatctacacttcctaatacagcagccatgagccacatacggatatttaaatttaaaatgaaattaaaattacaaattaggtcctcagccacaacagacttatttaaagtactacacatgactggtggccaccattgtggacagcacttccatagcacatgctaacatgctggagttaggcctctgcctgcatccctccctccccctgaatcggtgatcatgtccagtcctgtagctcccgccctgtcacaggcacgccctctgtctcttaagcgtgagatcgctcttcttagctcagtctcactgtttctttcatctctctagccttactctcttgttctctgctctgtgccccctgccccataacttcccttccttcccactccccccagtctctctcatggccaggggctcttccctgccatcgccacttcttttccccttcacacctcttcctttgcctcactctgaggttttcttctccactgctccctctctctaccttcgtctatcctattcctctctcctcactcttctccctaatttataaaacagctttgaatagaggtggaagttaatgtgattctgattttcattctctttaattctctttctccaacttaagaaacatcagggcaggaaggtaattaattatcctagcatcaatggcttaaagaagtacagctccagtctgatgagtgacagtttgaggttttacctgaagtctcacttgactgtcaagtatctcagggtcttagttctctggcttgactcagtgaaatccctggacttcagtgaccatgcattagccatttcctgccaggccacttaagtcctgagtcctgatgctgaactgccttctatagtgaaatctttacttgttcacaaggtttgtccagaaatgagttgaacttctaacccgattaaatagtaagtctcaaacataattaaatttccttcagaagggcgcactcatccccacacatgcagaagagggtgaccaggacagctgctcaggagtgtaggcaggaatgtgtgggaacctgtgtactcctgtcacttgtgggcttggggcccctcctgccaggctggtagctgggtgtgaccagggaagcagccagcagggagaagctggttctgcaaggtgaagtctggcagactctgcattttagagcagctgactgctcagcttcacaagtgctcagagcttacttcttcaatcctatcacctctgcatcctgttctgccaatacgagcaaagtgcttactgagtgccagacaccctgctaagcacagtattatattagctcacttagtcctcatatccagatgagcaaactgaagtccagagaagttatgtgaaatgctcaagatcaaagattggaaaatggcagactccaaagtccatgtttagcttaagtcttaaacttgacttctaatttttcattttattcccttcactgtggtctcccaggtttcccttgtttctgacagttgataaagttgcctcctttttttttgagacagagtttcgctcttgttgtccaggctagagcgcaatggcctggtctcggctcactgcaacctccacctcccgggtttcaagcaattctcctgcctcagcctcctgagtagctgggattacaggcgcctatcaccacgcccggctaatttttgtatttttagtaaagacaaggtttcaccatgtcggtcaggctggtctcgaactcctgacctcaggcaatccacccgcctcagcctcccaaaatgctgggattacaggtgtgagccaccacgtccggccaaagttgcctccttttaattcagatccttggctctcctcctccactcccaccggccccacctcccaacatcagccctactccaccccacaggtggtaacagggatttatacctctttccagatccccctgccagctcctgctctgctctcctccctcaggtaccccttagcaaacacatgtctttcatgtgctctttctaaaatgcaaatctggttacttcacaagctcaattaaatgccctcagctgtccttaggaatgagactaacctttcctgatctggtcctcgctacctctctagcctcctcatctacttgctccttgctctgtgcctaatcacacactccttctgggttctggctgccctctgactgaaattcctgttattcccggtctgcctactcatcctctaagggtcacctgaagacattcctctaaaagtttccggaaacactcttcttcaaggcagaaatcactgttcctcctccatcctttcctagaccacaaacccagatcacaccccactatgatcactagtctttcctaccaggccagaaggtctttgagagcaaatacacttgcttacttagttctgtcagtgccctacacaattcagatttttaatcagtgtcagttggatgagttattttccccctttgtgcctattttaacatattccctctggataaaaattctggagttgcagggcaacaaacagtagagctggccttggtccctccctggacgcactgcaattgctggtgagatggctgcctagaggcaactctgctcacagaggatcgcgggaaaaagctattcagttcaagaggtatttacctattgataaggttcctctgtgtgtcctcctcactcattaataatttcaataataatatattaacaataacagtaataattgttgttaatagtaataaaatacagcatgttccaggaactcacattcaggattatagaccggagatgcttctgtgcaaatgcatttgccatatcctgtggaggaaaataagcaaatataaggcagggtggcaggcacacacctgtgactactatcgagaggaaggtgatgtcaaaattctgggccttttttgctttcttaaatttttttcctcccaaatgaaaagtgggtgaatgaacgaaaatccactgaccatcagatgtattttacactctgcaacattccctatttttgtgagtgcaaattaattcaaataggatttcctttcctaatggcacaatcaactccactgtcttcaaagagagatgaggactgcttgaagatgagacgcttgtgtcacaaggacattgcacatggacacagagcagtgtgatggtttctaagccacatgcatcgtgccaggtagaccccactgctaaggctagaaggaactctagtgaagcactgactccaaacaaggaagggctttggtccagcaaccccctcccaccctacagcagacggctggggtctggacgctctacaacagtaagtagtctaggattccgttctaactggcttagagaacaatgagtctggtgttttgggtaattttttataacaggctcaccttttttataatatttgatccagactttgatagttatgctttatttatttagcccacccaggaaatcaagtttcctacataaatgaatcttccagggagcaaagctttaagggttctctcagaatcattattttgaccattcttatgcaaatcttttaaagacatattatatacatttatttctgaagtgactacagtgataatttaatcactgctaaggagtcggcttcatcaaaaagaacatcagtgattattctgtgttgtgacactgtgataccctgaggagctactgagatgtgaagctattttcccataaacaaaatggtcccagattacaatgcctttaatttttctgacagcttttcataattcttgtctcctccttccagtgtcgaccatcacttcttactgatgttaattaccatgacttcattttctaaactgctgccttcatttaattttatagagaatcctaaatcagtgggcctgagggagctgtcacacctctcctatggagtagtatctgtgagctctgtgtcatttttctcagagctgaaaggcccctctgtcacacttctggatttctagccatattccaaatggctaatgctgccaggaacattaaattttactttgcattctctgaatacatactggctagcagaggaggacagtggcctagaaacttctctggtaactataggaggtcgactgagattaaatcttgctgtggacaactcataaggtgggtaattgacagtggtctgcagctagaatataaaggtcttagaccaaaagcttctctgtggtgtcagggggaggcacttatcccctttcatctcctcgcaaagctgacctctctaaagctccctataatgaagaaatgagcatccaaattcccttttgtcgattgtctaaaccttttcggattcccacggtctagtaagagtccaaaaagggcacggataccttttctcttccactaaagcaagtaagaaggtgacgcatccatggtattgtctagatcaaagttacgagctgtttctgagtctggtctgccctagttgaactacagacccatgcaaaggcaagttataaaggaaggctggggccacactccctggggcaggtacccccttaatcctttctgtgactctaatctgcagtacttccctaagtgtcctgacaaaggagattcacagcacacaacctttccctgggtcttggcatgccctgaacatctagatcagaccatgagattcttgcctagctttgacttccccacctgcaagagctggggccctttccacatggcagtgctacttacagtgacaggcaggtctagaggattaaggtgcttgtcctgccggcagaaagcaaaagcacagagagaagcagacggaatgagctttcagcttacattcaaacaaggaccgggaaggcagattaacagagccaagccatccaagaaagacaaggacagacagaaccacagatgcttctggtcttccctctagaatctaccaagagctgggtacatacatgatcccacttgaatttcatcttactgagcccatgagattgtcagagaactaaaatgtcttacttttaacaccacttgggcttttctcagagaaatctagaatgttagtattggaagggctgtcagagatcatttaaactggccctttcattttacagaaagagaaactgagacccaaaaagaggttacaaacacttgtccagccagcagcagggagaatacttagtcccaggcccctcggctcttaggtcagtgtttgttccaccacccagctgattcttagtttccttatttgtgaaacagggatcttgtttttcctcagacatccttgtgaggtaaacaaggcagatgttgttgctcccatgtgacaggtgaggaaactaaggttcacagaggcagagctatctgcataatgtcacagttaatgaacaggggaaggaagatgtttagaatctccatcagagaacctttaaacctaagatttagtgtgaaatcccattcatattggactccttggactcagggtagccacagggtctcctcttccttattcttgattctgtaacccaggagttggcaaactatggccatattaggcctgttgcctgtttttgtaaataagattttattggaagacagccatacccattcatttacctactggccgaggctgcttttggctacaatggcaaggttgagtagctatcacatagaccatatggcccataaagtcaaacatatttattctctggccctttagaggaaaaagtttgaagggccctgctctcatctaagacccagctggtttcccctcataggtcttccctgggtcttccttagcaaagccaccctcctgggctccagaccagacagctaagaggaagaactcttgggaaaattgctggatttgtgctctctgcatagcaaagagtgcatggggtgagaattatctcagaagagcccagatgaaaaatgtgaaaaggcagccacagacctgtcgtttgtcctcaggagccttcagaaaaagtgcattaatcagtgcaatggcgtaggtctgaatctcctggttggagctgtgtcaatggagaaagaagagagagggagattagaagactgaacagcaagatgatgcttagaaatggtttaaaacaatcactcacagattataagcaaataatgatctggagctcagtctcaaaagcattcaaagtgggcatgctcttgacccagcaatttcactaataggaatttatcctaagacagtaatcagagagctatgcaagatttactgacaaggcgtttcattaaagtactacttaaaaaagaatggaaagtaatccaaatggtcacattagccaacatttatacatatgagaatcttaagtagttattaaaagtcatgttttagggtaaagattcttaacctgggattcagggatgagcttagagtatttgtgaaccccaggaatgatacagaaattattctatgtagtttgccaactaagtggtattttttccaaactggtgagagtatatacttgttaccagattttcaaaggtgtctaggttgcaaaaaagacttagaactacccttttagaaaaatctttgacatggagaaatgttcaaggtgtattattcagttaaaaaaaatcaaggtacacatagtatatataatgagatcccgattttgttaaaaatatgcataaaaatactgaagggacattcaatttaatgtttaacagtgggtatgtctggaggtgagataatgggcaaataattttgcgtttttctgtatttttaaagtctttgactataaacttattttattatgaacaaacaaaataactacaatcattctctggaatcttacaatcctggtacttgacatctccacctgccatgtcttgggtgcattctgtggctgtctttccagagggtctgatgggcttcctggttagtcacatggtacccagggagtctaacagagggcactaagtatccctcagcccaaaaaggaaagcatataagttctggtgacagctgtgggctgaaagtattggctcctatgaaatgccatgttcccctatcatccctagggaggcaactggggccactctgaattcagagacaaaaaaaaaaaccagagaagtagatgtgaggttacaggaaaatcagaattctctatctggagtttataatgtccctctcaccttaatcaaccttggtggctcgctgggtatgaaagctgaggctagaccaggcatggtgactcacacctgtagtcccagctactcaggaggctggggtgggaggactgcttgagcccaacagtttgagaccagcctggacaacacagcgagaccctgtctctacaaaaataaaaaaaaaaaaaaaactagccaggtgttgtggagtgtgcctgtgattccagctactcgggaggctgagatggggaggatcgcttgagcctgcagtgagttatgatcatgccactgcgctccagcttggacggcagagtgagaccctgtctcaaaaaagaaaagcaaagaaagctgaggctgaaaattccttaaaagtgacaaggagaaatcagagttgcaaagaaataattgtgctttctttttacttggattagtggggaaaaacaagttgggagcatagctgagtgaagacagggccactataaactcccaaatctgggagctatgacttcccctcgaactggtgggggattctggcaacattctgacaatgtctaaaaaacagaagtgaacaacagtcagaagagaatcaacaggagtgccaccactgttttgcaaagtccagcttccttacatggtgtaggttggttggaagtgaggtaaaaacagcggagacgggagaaacattgctccaatgggttcatttgtcatatggtctcagtatctggtaaaatgttttaggatgtgataagagtcttaacaaacaaacaaaggaaaaaagcccctgaatttactgaatacctaacccaggttggcctctatgctggacctttttaaaatctcctttgatcctcacagtgtgagaggtgaaggtgattaacctattctagagatgaagaaactgaggccagaagagactaggttacttgctgatggcagagacctagtatgcagaagagcctggatttgaactgatattccaaactcacacctgtgtgatatttcttacaaatcacccacagtgcatcgtcggttcagtgagcattcattcaacaagcactaattgagcctctacttaaatcaaaacaggggatacaacaatgattggtctctgtttcaagggggctctatgttcaaaatgggcaacagataataaaaatccagtattttatataattatcataggtacagagactactgggcccatgtgagaaagcatctaattttgcctggtaccaccctggtatgggaagactgggaaaatcttcattttaacctaaggggcagagagagttacagaggattttgggcaggagcatgacatgatcaagtctgaatgatgggagaaattctggcaggagtgtggaagaggtgatgaatgaagaagccaaccaacagcttggaatataagcaaaggagagtaggattggaagacttaaaataagaggagaaaagaggacagacaagtgaagggagggaggtgtagggttttttactcacacctggaggtgtgagatgagctgtcccacggtgatttcctcggctatcttctggtacagactctggctgttcaagaccatgctctccaggatggccagggacctctgaaggattgacacgtccaccatgggctggctcacataccctgcaatctagacccagagatggcacatcaattgagaagctcagggcccaagaaagatagaagcttagcatctgatgctagcccttgaagctctctctgcttcacatttgggcagctgttgctaggtggatagtggtatctggtttacggctaccctggccaatgtgccagggattcccttggcatggataccttaatctcagattatagtatccacttaattgtgtttcctcaaaatctaaaagcttaattctttttatcaaaataagggttccagtttgagaaagtggggtataaaaaagcagaggattttactgatactgggatctcattttatctccatgtacctcccctgacacacactccccctaaacacacttagactttgagaggtagaaaggaccttgaagccttttactctaatccttcttctcagtccccattataatatccttgacacatggtcatttcacttgtgtccagtgtcggggagtcccaatgtcctaagccaatgatagctgaagttctagggcagcagatacaatattattcattggttttagttcagtattctgaattgacactgctcctttgtgtaaaagaaaggagggtaaaaccagaagtaccctctcctacccactgaacttagtctgacaatccaaacaggctaccttgcagatttgtaaatagaaggcaaatttacaaatgaaatgcaaattttttttatatatatacaaaaagaagagagagctcaggaagtcggtcaaaagactcagggctagtactggttgactggctggctttatccccagtctcactgacaatctaattctactttgatcatatttagttctgacggtccagttccatctcagtgcaggccctgagaatataacaaaatgcaaatctttcagaagccacagaagactagagcttgaggatgaaaaatctggccccagggaatataaagctgatctcaccagaatggcgatattgcctgtatctccccttaagccttgtgaactggcagctgagggaggagagaaagacagaatgttggaggcctcacctgcttaataaaggtgattgaaaccatgtcccaggagacaatgccatggtccatgagctctaggaaggcagtcagggtgaatgccagcatctcactgtagctgagacacgtgcaacacacacacaaaatagacaaagattcagatcgggaaacacaggtgtgagggcagccacaaaaaagatgaattttaatgtgaacaccccatgggaaatcagtcgatgcaactgtaactgtaagtgcctgtgtgcacacctagccagtgtagagcagattcagcccaggtatctatcgctgcaaaaaaaaaaaaaaaaaaaaatgttgctgggtaattagatcttccttctccatatgcttcatcccagggacacagaatcacttatctatttcccaagaccaaagaagacattggacctttgtcaaactccaacacctgttgggagaacctaaggaagtgtaagtgccatgttaacctttgggccaagaggcagtagagtgcaagagatgggttcagttcctgtccaccttactaaccaagcaaattttatcttttcaaaattcaatttcttcctctgtaaaatcaagttagtctcacagcgttaacctcacagggttgtggagacgacaagatgatgatgtatgcaaagctcttattctagtgctggtagagaataaggattaaaatgttttctcttttttctcttctccttatacatttaatcctttatacatctgtacagtgctctagaattaacagatgatattcctatttacaaagcatgttcagacacattctcattaacaatacttctcacaataatactgcaaggtagctattattatcctcaggctgaagagagtgaaactaaggccagtctaaccctgtacccttgggagactgtagaactatgtcagtgctgatggcagctgaaggcttcaggacttcaatacagctggaagatccaatatgtaaaacaaatatctatgattagttactcgatttggctaacaatttcaatagttgatctatgggctgagaagatttctgactccctctttggcaggttaggctccaagcacctgtttactgactgctgctcacaaggcacagctgcccaccgcatgcatgtgaactctggggtatgatgaagatgcttgtgggtatcacaaagttctggtctcctcctccctgtgcaaaagtgtggcagggagatggtgaatgggtaggttgacacctgtggtaaacacaaaggaaggcgtgtgtgtgtgtgtgtgtgtgtgtgtatgggctgggaggtgactgaagagggaggagcaggggatgattacaaacagacacctgggagatactggaccatctgctcactaaccctcatcaaaccaaacatttccagcaattaacaggtctgtcacgacgtgactgctctcctcctgacttctctagcccctattttcactgctcacttggcacagtactgttttgtactgttatttaatttgtgagagcccaaatagactacacgatttagaatcacaatatggaattatatatcttggtatggactctagtgcttggcacactgctctgcacacaggtggtattcaataaactccttatttgactcaagggaaatgagactaggatgccctgtgggatgtagtaaatcgtcgaagtccttggaacgagaccttagtcatactcactgggacaagagcttggttccactttccacgagccttgtcagcacaatgatgccatccatgttgatgaactcagtagcgaaagtcacgtcggcagagagcttggccagctccttcatggcatccagccgggtctccatgttggatgactgggtcctctccatcagctggcgtgcagcccgggactaggaggccagggacaagatatgtgccatctgctccttggagcaggttactactctgtggatagctcacagaggcccttctgtggacatccaaacctgaggcagaactagttttttcacacagcttaggagttgctaaataaatgtttgtggaatcaatcagggagttattagtatgccaaaaccaatctgtagttatctgcatcttttctgtaccgctttggcctatggatttaaaaaattcctaccaagggaatactggaggcatctgggaggcccactaacgatggtaagtcacagagaaacagatactggtttaatagaggaaggttttctatttaagctgtcttgctgggtgcgtggctcatgcatgtaatcccaaggctttgaaaggccaaggcaggattgcttgaagccaggagttagacaccagcctggccaacagagtgacaccctgactcccaaaaaattttttaaaatgagccaggtgtggtggtgcacacctgtagtcctagctactcaggaggctgaggtgggaagactgcttgagcccaggaattcaaggttgcagtgagctaggactgcaccactgcactgcagcccgggtaacagagcaagactctctctcaaaaataaaaaagaaaataaaattggtcaggtacagtggcttacacctgtaatcccagcactttgggaggccaaggcgggcagatcacgaggtcaggagttcgagaccaacctgaccaacatgatgaaaccccgtctctactaaaaacacaaaaattagctgggcatggtggcatgcgcctgtaatcccagctactcaggaggctgaggcaggaaaattgcttgaacccaggaggtggaggctgcagtgagccaagatcatgccactgcactccagcctgggcaacagagtgagactccatctcaaaaaaaataaaataaaataaaataaaatttataaaactgttagacagcagaagaggtttctcttgaggtattaagctccctgtcagcagaagcaatcaaggagaatctggacaaccacctgtcaaagacgctgtagaagggattcttgcattgggtgaagaatttaatctgatgtcctctaaggtcccttttaatcctaaaatgtgaaaagcctggcaattttttaaaaactttctcttagaatccatatgattgttcctcaaagtgacagttctggggaaactttaagaacatcaaggagccagaaacaatttcccaattgttttttgaaaatgaaggctggtgaagacaaaacctcctcctagcacatgaacttttcctagcaggatgcctgcctccttttctgcaagctgcggctaaaatccctcctctagtattcactgggctttccttccgctgagctcattactacatagtgcctcacaatttattgtttcatcattctctgttttttgggtgttaatttaatgttctccactagaaagcaagagacttaagaacaaaaacacacctgtcttctttcctttttctcagtgttaagcaagtgactggagcccaattcctgctgccgccaaggagtcaggcctgctggccctctcccctttgcctctcctcttttactattacaaagctggcccttcaaagcacagtgctctctgcaatacagaagccctcgctatctctacagtggagaaaatgtgcgccacgggaaaaggtcatagcatagaacaatctgaagagcactggtctgcatcccacttagaaacctccaactccaaatgtcaattttcctcctgagacagcatttctgggctgctgcctcccgctccagagagatgtgcttctgggaaagtcaactacactgtgcaagaggtctgtgaaatgtgtcggcacttccataaaagtgagtaactcccagactgtcatattaaattaccagagcttaggagggaagaatgaagtccttaagatgagaagagttcaggagaagagggggaggcagaagaacatgatgggaggaatatgggcctagagtcagacagacctgggtctgagagcgggcttggctactttattagctgtgtgacaagtggcaagtaatttaacctctctaaccctcagtttccttgcctacagaatggggctatcaagagtacctatctcatgggatgtctgtaaagattagatgatttaattacacaaagtatttagcaaaatataggcattcagtaaacgctggctgatatcacttcatacctcccctcctctcagatgaaccagtctctctctgcaccaagaaaagaagtgccatcatgcccttaattttctggctgcccttctacaaatgtaaccaaaggtgcaaccatattggctgtcttcttcatgggcctagcagtcaaagtgattccctctacctgggctttgagtccttcctctcctggtccagtaaggtcctgttctattgattacctgctttcctgcaccttcaaccttcctctcttccatctgaacacattcttaagggcacataaaaaattgcaacagaaacaaccaacacgaagggtcagaaaggtggggaactgggcagatggggacaggagttgcggggagaccttttgctacatctctgtgaaaatttttgatttgtgaaacacatgaatgctttacctgcttttaaaaagcacatctttttgactccacgtccccttcgcattatcaccttctctgtgttttcttttaaaaccaagcttcttgatacagcagtagactcaaagtcctcactgttttacctttcttttacttgaccacttcagtgtggccacctggcctccccaccataacttttttgtgagtatcaccagtgtcctctaacctcccaagtcattagacagcttttctgctctcagtttactaaatctctctgcttattaaaaattgcagaccatactctcctcagtcctgacactctccctgcccaaagctcctcagtcacttcaccttcttggtgttctttctacccttctggttgcttccttagtgacctttaagggctgctcttgcacaaatcagggtcatcctccattctcccctttccttccacatctagcatatcaccatactcataaagcttacctcctagatactcttcatatccatcctttcatctccattaccacttgccttcactgggctgttaacattccttattagcctcttcaaaggttcctactaccaccaaccttcttcttaaggcccatcttccacatggtcactaaagtgatctttctaaaacttaaaatctaaacataacatatcttcctgcttaaaattcttcaatgtccccagtttccttctggacagagttgaaacctacgagtaggccatcaaggaaccttgaatatctggcttctcaatgactgctacaagcctccagccacccagcactcctgcttttcccaaacacagcatacctctgtgccttggcatatgctgatttctctgactggaatacttttccttttcttatttctctagctaattcttgctcatcctttaacatctgagctaagtgacgccttctctggcaagactttctggaaatctccaggctgagttaggtggtcccctttgtgagttcccacagctccctaagcaactttctctcaagacccttgagacaggccttctattgcatttgtttactccccactaggtggtgagaaccaagacagacttattttcctgtactatttcctgatacaaaaagactgactttcttatctccagagtacttatttctagaacagagtctggcccatggtaggtgctcatatttgtttgtgacatgaataaactcctaaggaagaaagaatacctaccggggagatagccagttgtaagattgtcccattcttaatgtcactgcgagtctgggtagtgaaaaataaacaaaaaaagtaactaagataaaatgttaaagtggtacaagcaagttgaatcaacaataatgttttgtcttttttacagtagatgtaactgaggatcttcagtcgggccctcttctcctgcttattccttggcaaagaatttctaagatcctcctctagcaccctgggcactcaggaagtaaaagccacctttttctagccactagggaagaacaagggctggtgtttcccagtctgtccggagagtgactctttacccaacacatggaagctacctggatgctgagtgaagataaatagtgccgtctccttgggtcgtttaattccaagcaaggcccatattgattttgcctctccctgtactaacctgttcggtgatgtacagctgaggaccatctgcataacggagggtataatactctgggtttggcaacgaccacctatgcaagagaaaaacagtatatcccacttggccactctcttgttcagaagctgctcataagtaattttcaaaagagttgctcaagggattgggtggcctatttggaatacagtggaaacaaagctttaggttgtcatgttgaaaaaatcatggcctcagccttttgtaaagatgagcaccacaataggaggtgtgcagaactgaggaggggtctcagatcctacctcaatagggcaatgctagactttaaggaaaaaattaagaagtataaacgtcttaggggtatggttgtcaactgtacttccttcccaagacaatgattcccaagacccccatgctgaggacctgcctaactggagatccttcccagaactcccctcaaggtgtaggagtgctctttcagtcggagctgccactgttgaaaacgaggtccatttcaacctacccatcacaaacttccttgataatggatgccaggggccgtttctgaaagagagagagagaaagccttcaacagcagcaacatcctactcatgccaaggttctgacaagaggcctgccaagcagggtcaagctggggcatgagaatgaacttctttcctaacagcttttgttgaagaggaagcctctcccaagccatggtgaccgaccttccctagggtgggccaggcccaaagcttagccttcctgttgctcgttcttactcttgatgccggtggtccccatccctcaagatgtcctctgccatgcactccccaggtgcctttccttgaaccactgcttctcacttcaggagcatacctggtcgatttcaaggagctgggcgttagcacctggccactcaatggccactttgacaatgtctgacggtggtggcatcgttcccaatgggctctaattctgcgagacaaaaacacagacacggctgcctggggagaaagaatcagaaaggtggaaaaagagtatttcttcatttttcactcttgttacatgttttgaagagtttgaagacagacactgcataaagtaacacatgaaactacctggtttgaatttttctagatcataccacaacttctgcttaggattttgtctcttgagattaaatcagcaagaagaaatgggacaaactatctatcatccatagatcagccagtagcaagatatgccaatgtggcacttcagtttaagagtcaagaagactcagtggtagaggaatgtatttactgcaaattcctgtcttgagaccttgggaggagagaagcatatgctccgagacagataagaatagacagccttttcttggttgagtggttagctggaggagccaggctacttctttctgcagtcatcctaggaagatcccagcatcagcagggcccagctacatgctctcttgcttcctccccactcatcgatgccacccctttcccctcaaaggacacaatgcaaagcctcctctgtgtgggacgacatcagaaaatggggaagataactgggacaggaaatgctattttcgtccctactgccaagggcaagggcggctgacaactcaagtggagagaggtaaggatatcctcacacaagggcccctcttataaggacaaggctttgcaagtacctctgaccccctcccccacttctctccaaaataaaggaaaataaatcatcctgagcaagtctggaagatgggcccatgtgactggtatcctaggcaactctgatagcttactggtattccaagcagtaactaaagcattctctctccaaggtctgacgaagggaagtcacttggctgatggattatttcaatgtatatttacactccttgcctacaagttcaggagaggcccctctcttaatgaaaaagacctttctgcatcctccaggtttagccattcacccacaattcatgcctcgctaatggggaccacctgcctctcctggcgtacaaagcatagctgtcgcgaggctattatgcatgtatgctatcaatttttcagcccaaacacagatgtcagttctcacagcctggtaagtataaacctcttagatgaaaaggagtaaaagtcctgtcccccacaagcccatcggcctcagaaagagggatgctttcatgaccatttcctagtcagaatgggatgcttcagaagtctactgtcataaaaagccagcatttccagaacatgacaatgtaaaggaactagttttccaagtgctttcacttattttattgtgtcctcccagcagccccacgaattaggcagaacaggattatcacctccatttgaagatggcacaactaaagctcagtgttttgttaagtgcccaaggtcacccagctagtaagtcataacggttgacagaacttggactggcttcggccaatgctttccccttttcctttgagccagcctcaacttctgtccactgcaattaaacgcagcctaaagggattgaagtgggttggccttatggcccccaaggcttccataacttctgcagctcatggcagaatttttcacatgtaatttttatgtgcctagacacacgacaaacctcagaaaagaaactggccctatctgcataatttctggggaaaatgctctgctccagttacagcaagacagggagttcttgttctaggggtggcgccatcaatctctggatgcttagagatgcatccttatccttatcggcaaagctgctgcaattagtagacaggactgcacggttgtgaggtcaattttaaaaactgagatataatttacatacaataaaatgcagagggcttaagggtacatatgtttgtatatataaatatacatcatataaatatacacatgcatctccctgtaaccagcactcaaaacgagacactgaacattttcatcaccctagaaaattacttcatacttcctcttcccgtcaatccttccagtcctttaaaggggaatttctgacttatcatcatccatgagttttgcctggttttgtacttcatataaatggaactatacgatatgactttttagatcatttgtttagtttggcttcttcttatttttaaaataagcaggcacagaaggtacaacagaaagaacactgggctgggataattgtccctgctgaaacaagtgactggatttagaaccaaaggcctcaggacccaatcctaggtctttcacaatgtatacatggccctttaaccaaatctcagttttcttctattgaaagatgtgagtgtagaactaaagcatgtctcaggtgccttctaagtctaaaagtccatgattcttaagtggaatttaaaaaatccaagtgaggatgcccattttaaagtccttaccaaatgaagttacacccttccttaatttcgatggtgctgctaagaaacaaaccccatgatttttaactcctttctgaacgccgtctttggagattaagctaaagctcattaggttatagctattattttctcttgaccccatatgacatatcctagattgactctctctttattaaagttagccctgaatgattctcggctgttcaaaaattcgtatacattttaaagcatggagatttgcaaccaccaaactatttgaaagatattaataagcccccattctcagtgactctgtccttcccacaaagcccaggcagcctctctgaactgaatgacactctccacaaccctgccatagctgatgggactaaagtgaatacccaactttagctgaactattccagttctttctcttgaatttaaaagacagagactggctgggcgtggtggctcatgtctataatcgcagcactttgggaggccaaggtgggtggatcgcctgaggtcaggagtttgagaccaccctggccaacatggcaaaaccccgtctctagtaaaaatacaaaaagtagccaggcatgatggtgggcgcctgtaatcccaactactcgggagactgaggcagggaggacagcttgaacccaggaggcggaggtttcagtgagcacagattgcaccattacgctccagcctgggcgacggaatgagactccatcataaataaatacacacatacatacatacaaacaaataaaagacacagactaagggaactgggtgataatgaccctggagaagtaagatcatagtaagcttcagagcgaataccatggcaagccaaagatccgtacgagccaaagatatggagaataaaaaaccaagagcctttcagaggaagtgattctgcaggaggaatccataaatatctaaatgaactgaggccagaaatcagaaagagatggaaaagccattacctgctaactttccagattatgtggctattacttcctatgctcggggtacctgaaagtccactgtatcctgccaataaaactcctataaattaagctagtctatgtttctactcattgcaactaatacgcctaagaccacagctgcccccaagctctgcaggaactctaaaacggaggtctgagcagacagcagcatcactagcatatgatgatggtactgggtaagcacttaattaacaatggctgaattaatgagagcaaaacccatgggtttgctcttacccactagataagtctgatttgtttgaaacagatcggttatatggtaacttcatagtaatcatatatctagtagtaacgtacaggtagcctctttatttttatttttttaaattttttttaaaagatggagtcttgctcttgtcgcctaggctgaagtgcaatggcatgatttcagctcacttcaacctctgtctcctgggttcaagcgattctcctgcctcagcttcctgagtagctggaattacagatactcaccaccacgcccagctaatttttgtatttttagtagagacggggtttcaccatgttggccaggctggtcttgaactcctgacctcaggtgatccatctgcctcggcctctcaaagtgctgggattacaggcgtgagccactgtgcccagcccaggtagcctctttatagttgattgctcacttctatatcattattatagttgatgctcataagaactctgaaaaacattcctaccttacaggtaaggcaactgaagttcagacggattgacaaacttgttctccatgtacctctttctacacctccctcctaaaagaaggaaggaaagaaaaaaaatgaagggagggaaaagaaataaaactaaatcaacccaacacatcagaactgggtctcaagcctaggtcttaggactccaaagcgagttctcatcgctctatataatacttccttagatgatgacattagctagcaattacataatgctaaggcactattttaagggctttacatatattaattcatttaatccacacagcaatgctgtgtggtatgttattatccccaccttagagataagaaaatggaggcacagaggagttaagtagaaggctcagtgtcacatagctagcaagtggcacagccagaatttgataccaggttgtctggtgttgctggaaagccatgagaaagcaggtggctctgcacctgacccgcagcaggtgctttgtggagatttctggtttgtgtatctgaaaccaaagcacactgaggctaagaaaccttcacagcaagaactcaccattgtaacagaagacagctctccactgtctacaggtgggccacactccctcgtgtgctatttggtcctttacaatctagccatcctggactacgggctatttctataaggcaggccatgttctttcaattcttctgtacctttgcacattctcttcctcctactgactgtcagaagagctcctattcaagcatcagagcctagttcggatgttacctcctccttgtactagtcttagctttctctactttccctggcaaaagtaaataggacaggggcctctgtgttctcacagcatcctgttcatacttccgttaatgagtacgattttgtcatactctattacagttacatatttacacatctccactagctcctcctccagaacaggtataactctgcagtctcataacctagcacagcacttggtgtccagtgaaggctcagtaagcacctgtgtctgcttaaacccaatggctctgatttcttccactcctgtgaaccaggctggctccaaacagacagggacaggcatgaactgtgcaggctgtctggtgttccctctgcgtcccaataccctctaactacacagtatttccattgtttaacagtttgttttggctgggcgcagtggctcacacctgtaatcccaatgctttgggaggtcaaggcaggaggatcacttcaggccaggagttcgagacatttctctacaaaaaataaaaattagctgggcatggtggcgtgtgcctgtagtccctagctactcaggaggctgaggcaggagagttgcttgagcccaggagttcgaggctgcagtgaactatgatcatgtcactgaactctagcctgggtgacaaagtgagatcctgtctctattaaaaaataaaaataaaataaaaaactgttgttttcatatcaaacattagaataagtcttactgaaaaatcagggttagcacccctaactctagttgaaagaaagaggaaaacctccctctgcttttctccctatcgaaaagaaacatcaggagataggagactagaaataattctgttctccagataatattcccaggataaaggatctccttatagggaacccttccagcacgtgtttgcttactcccttcattttcattctagaaaggaagtagaaattaggtcaaaggaattcagtaacattgcaaaattctcagggttataaatagcctcttgctccgccactcagcagtactgtagctcaattgcaaaccaccagcataagggagctgtagttccatatccaggcccagagggccccttccggattaaacaactccccacccttctaccttccactcctctttaagcattacagatataaggatgatttggaaaactcaaaatgctacaaaacaggagacaggcacacactgacctgatgacaattttactataagtcataagaatgaaaggccagtttttcaaacacagagctgggaaaagtagagaaaaataggaacattagtgtctccaatggagcagtctctaagtggcttctagaaggtgtgcttataaaatcagcactgttacagaagccccatggagctttatcaatcacccatgcagtgactgctgcttcacggagctggattctgagagcaggattggaaaccgaatcttaaggaatgaagtgaaagatgatctcctcctattagtaaggaatttgggatgaagaatgccaggtttccagctcccctccttccccctattcctttcaggataagaacggatgtgtactttttgttcagttatttggcttttgatttggtgaaggaggcatgggtaagtttggtttatgtttcctgcaacagaatgcaacctcatcaagaaggcaagttggagtcacgccctttctaatcgagaacacaatctctataaaggcttccccctctgaaatcttctcatctgagaagtgattcaacttcccttagttcagtccactgaatgacgatcagactctgaggtacagaaaagggaggatttgactggcagagattaaggttcttatgtttactgctggaagccctgggaaggaccaccataccaacagcagctgaggtttcccctttttgttgaagtatgttagacacaggactcattcacacatggtaaaaagccacaaacttacatagaggcaaaggtgtggtgagaaggggtgtgggggcaggggaactatttgggtttcttcatcttgattcctgctgtaagaatggcctgggtcttctcttatcctgcacagacaccttctgtagtgttcctatacttaaagaatagtgcttaagtaagctccttagcagagcattcaacttactccagttccaccgtggctctgtggtggaactggctttcagattcgcttttgcagatgccatgttctcaccagaccacctgttccctgaaaaaccatgctcttctgagtctgtatgtttgcttgtgctattatttcctcttccttgtccagctggcaaacttcaactcaaccttcaaggcccagctaagataatcactcttctatgtggctttcctaatcctctcacctcagggaaaattaattgcagcctcatctgtgatcccagtcttctgtacataccttcctgatcctactgatttataattctctatgtgcagtctcttccctggctacgataggtgtgatgtgcataccagcagcggcagtatccctgggagcccagacccacccaatcagaatctgccttcaaacaagatcctgaggtggttcaagtgcatgttcaagtctgggacataggctctagatcagataaggtccgagaaacagtggttctcaactctggttgtgcaccatcaacacacaccccaggtcatttataaactctcagatgctcagggttgacccacagctccaggagagttgacaacctgagggcaaggactcatgaagcctaagtctattcccccatctactcttcccccagtttgcagcacactgcctgccacatagctgtgtccacagaattccacaggaaaattccctccagggtgcctccagacctaaatgccttcagaagagagtgaaaacactactgactgaggattattaattgcctagaactttccaaatccctaaccacaatgactgaagagatgaatttacaaaaagtcagtgtttacaaaccacttacctcagtttttggaaatgagaggaaacagaaactgagatggaaaatacagatgaacttcagaattaaactttagaaaaccgtgattgcacaaggagatggagcttgggtagggagggagtgtggtgtgctgggaagagtcctgggttacaactaaaatctcgggctgtgaactccttcaatactgaccataacagcacagcattgttctcagtgtaaaatcaggccaagccctttcattacataaataagggaactgaagtccagagaagctggcaaggccatgccaccagttagggacaaaagaaggcctaggcccccacttctggtttagtcctcctcctgcagcacagctttgccacaaacacaagcctttctggacctcaggtcctgatctacatcgggggctggactagatgtttttgagctttcttccaactttggccttctagtgaggaagtgtagcttaacaagttaggagctgtgttctggagtgggaaaggcctgaacttggatcttagcactaacgattttcttacctgtaaaatggggattagcatcaactctaccccgtaaagctgttgtgagcatcaagtgggataataaagcactaagcataatagcagaattctaaccgtgtgaacctgaagaaactgcaaaagctctgaaaccacgtttccccaacacagtaagccctacctgctaggcaggtatgttgtgtattgttgacaaaataagagagcatatgtgaaggcagtccgggaggaaagtcaatacaaaaggcaaagcatttgttggtgttccactattattattactatttcccagtggaagaactttggaaaatgttatgatcagttccaaagcagcagctaatacaatgcctggcaaataagaagtgctcaacaaatattttctagtgactcacatgaaaccagcatagcatgcctaatagggttataaattcaaatgtcttgggcagccaagcaggtaagtaaataaaacaagcagcctccatgtagggtctgtaacactgcaaagtaccaccttgcctagaggagtttaaatccaacatttttaaaaacacatcatgcagcttggccaagacagccactttgcagcctccagcccatactgattctggctcttcattacacctcatgatgccttgcataccatctagtcattttatgtgatccagtcttgtctttccaagtatacctgaagcatcctgaagatgaaggctatgacatacaccgcccaatcaccaaaaatggcttacaacagtgctggtcacgtggtagatactcagtgagcaattgctgaactggggctgtaggccgggcgccgtggctcacgcctgtaatctcagaactttgggaggctgaggtgggcgggtcacttgagatcaggagttcaataccagcctggccaacatggtgaaaccccgtctctactaaaaatacaaaaatcagccgggcacggtggcaggcacctgtaatcccagccactcaggaggctgaggcacaagaatcgcttgaacgtgggaggtggaggttgcagttagccgagatggcaccattgcactccagcctgggcgacaagagtaaaactccatctcaaaaaaaaaatagaaaagccaggctataaactcaagcctagtattctcagcacctctgagatgctgcatggtatgtgtttttttctatccaggtcctgggaccagacttagtccaggctgggccgaggtatggtgaccaggtcaaaggacttgccttgcagggttttcttcaactgcatcaaatatgcttcttgctgagccaccttggcaggtggtactgctacatctggacacattatctgagcacagaacaagctagaatatgctgtacactgaagtttttaaagaagtttggtcctgacttcctgtaccctcaaacttcctttgcacctcctagagtccacatcagatatatagaaagaccagactgaagatgaacagatagaggtcctaatctcacctcctccacttacaaactctagaattatccccggcaggcaacctcttttagaagcttcactatcgatatcagtaaagtgcagataacaacagttatctcaaaagactctagagggtatacaaagtgtgtgacactgtacagcccaataccacaatccctggccataggtggttactaagcacttgaaaagtggcacaggctgccctctgtgtaaaatacaaaccaggtttcaaaaacttagtacaaaaaacaagaacgtaaaatatcccattaataatgttttaatattgattatgttataataatataattttggaatatattgtgttaaatatattactaaaataatttcagctgttccattttttaatgtggctactagaaaatttaaaattatatctatggctcacattacatttctattagacagcagcatcactctagcatagagcctggcacacaaaaagcattccaaatgtcagtttcattcccctgcaggtaggacatcagtgaccacgattcacatccccttcctcttgccaaattcaaaccctgcatctatttatttggtaaatatttatattgcctggccctgtgtgagatgctagagatactacatgaagcaaaaccgacactatcttcttcgtggaccttacaatctggtgggatggacagagaaatatcaatacttttgtaaataaatgtaaaattgcagttgtgcaagtgttgttaaggacaagtacccagggtgataaacgtggggtactggtcgaaaagtcagggacagggatgcctcccctgcagaagtgatgcttaagcggagatctgaaggatgaagaagagtttacaagactaagccaggggaggaagagcagaccagggaggaggaatactaaataaaaggccccaaggaaggcaggagcttgggatgtagaaggaacagaaagaggccagtgtgtggagagcactgagcaagcggacggacgagtagacagacttgggagaggtcagcgggaccggatctccagggcctgggtgaggttctggatctgaccctacaaaggggtgggacgccgggccagtttcatgccctaagcatccagatctgctctgcatttctcggctgggcgcggtggctcacgcctgtaatcccagcactctgggaggccgagacgggcggatcacttgaggtcaggagttcgagaccagcctaacacggtgaaacc[137 bp omitted]cactccagcctgggcggcagagcgagactccgtctcggaaaggtttcaaaaaaaaaggaaaggtttctctgggcacggtgcaaggccgacaggagaagggcccctgtgcctgcgcagggcagaccagttaacacactgcaactgcccaggcaggaagcgagaggggcctgaactcaagggtgagcgcaggaggtggaaagtacatgcaccggggtgctactgagccagcaggatccacggggcggactggtggacgcgggcagccgggtccaggttgagcatgaccccgggctttcaactcgtgcgggcccgccccgagcgctctccggcttcttcccagccctctccttgccgcccctccccgatcttcccacccaacgcctccctccttctccctccgaccgctgcccagcccagcccccgtgcctgactgcctggcccgccctcttccgccacgcgacgccccttctgggtccaggacccggtctctcctcccttcctaaggccccggcagggccgccacccctcgggggcctgacgagccggcgcggtccagcccaggcccgccctctcagcccctcagcctccggagcagacgctagccgcaacgctcggcccggcctctcttccctgcgtctttcgggccgggcccctctccaccgcctgccgcgccccgacccccagggcgcccctcactcaccagggcgcagacctaggcccagctcctgctcccgggtctccgctcggcggctcctccagcctccgcccgccccgccttcttgggaccccgccccgcacaggccgggcccggcttctattgctccgactcgccgtcacgctgaagtctctttcttcaattaggttgcttgtctgtcactcaagaaggggcgggcacagctgccggtagaggggaaaaacgccggccgtccccgcccccctagtggaggcctcttaaagaaacaggacgccattcccctgcgggctacagggtctgaaggaaggtaatttcccagctaacccaagaggcagctttctttttcccccaaacttttttttctttttggtatgcagtcctagagtgaaggaaaaggcttttgctcgctgtgtcaaatcataggttgtgagctctaagcgggcctctggtggcactccgccctgtgcccagcgggcacttaccgcacactcaacagtggggatagctgtggtttggggaactgagtgggaggtgacagtcgtgtcagaggctgtgagcagccgcgctgctcaccaccgagttggagctaattataccggcacccagggctgaccgtgggcgctgagcagaggcagaagggtacaactcagctgtgctgttggaagggatccgtgggaggtggcattcgtcactgcacctgcggatcggaacaaggccgggcaccgcgccaaggactcactcctgctgtctctcttcatgctcacagcagccgtgtgatggagggagcaccgtgatcccttcgctgcagatgaggaaactgaggctcagagagggtccgagatcttacagctggtgaggggcagagcaagatgccaacctatgcctgttggattccaaagtttatactttaatcgtttgtctagcagattcttacaacaatcctgggaggtgtgtattcagctgtccctttgcagataaagaaactgatactcagcaaagagacgatgtagtgactaccacttgtaggccactgcgcagtctgcaaagcagttttacatacgttgtttcatttgatcctcgaaacatcttggaattaaagatgatttttgttagtcctattttacaggtgaataaagtgaggcttggggaggttgaggcttagccatagctaacattgctaaaactctggcaggagttactctttctccttctcactggctggacccagccttgaccttgtgatgatgatgacgacgtgctagggaacagagctacagcacaggaggtgccaaatgctacctgcctacttgggacactcacttcatactcttatgtgaaagcgaaatgatcttctccgttccttttattattaactttgatagcagggagggctgtttgagccaaccctgcactcacacaacactgaggaagaaaggcttaaattttgtaccctgggtgcctcagtttgcttcatcctagtcctggctctgcttaataacacatttatccaaggaatgaatcactcacttgagagctttacaagactgtgtcatttttttttcctgatattgccagtgcaggttctttgattgccagtcttaggaatcaattctggctaactttacccaaaaaagattttattggcaggctagtgtttaactcacagaggtaacaggaagctggagaatcaggcttagaaaaggacagaaagtggagatgctttgagagtttaggcaggcaagtgaatcaattccatgtttttcttccctttcttgaccagagttttctttgatgagtcaaagtccctggagcaagggttcgattggcggagctcaggtaacatgtccacactttagctaaggagggcgggcaacttgatggacagctccaccaagactgcacagaagtgcagagttccagatccctcttcctccacctcagctgctcccagtgggcaactaggttcaggtgccgtgttttcaggctggaatcaaataggaggagtacctgcagctgaatgtcatgattacacaaatgcaattgtgtctggcacgtgggagaggatagtagagattctgagctttgtaaccttgcagacctttgtgctatttaccagctgtttgtccctgggtaagttactagatctctctgagcctgtctcctcatgtgtacaatggggagaataacagtaccagccttaatggattgttgtgagaaatgagatcactgtaaatatacaacagttagcaaaatgtctgcatttaagtgctcaataaattgtaaattataaaattttaaaattatagtaggccttccataagtacttattgtgtgagtgaattatctacccctctcagttctctaatccatttgacttttgttttttgtttttgagacagagtctccctctgtcactcgggctggagcac[132 bp omitted]acggggtttcaccatgttggccaggctggtcttgaactcctgacttcaagtgatctgcctgcctcagcctcccaaagtgctgggatcacaggtatcagccaccacactgggcaaatatggcccatctttagagtggtgggaagcttagagacaaaatctttaccacggtctacaagaccctagatgatctggcactttacttctcagacttaatctattcctactctcgccctaacttactgtttgagtcttacatactaatttcccattctgtgaacacacagtttcttctcatctctgtgcctttgcacttgctgttccctctcctggaatgctcttcccccagctcatcacatggcttccatcttcactttattcaggccatgctctgttatctcctcttccaagtcttccctgacagcactgtctcctatcatccagccgctccacccttctcttcccttaacttgctctagtcttctccctagcactgcatgtcatattactttgttttgttttctgacttccccattagttgtaagctccatgatggcagagatcttgactgtcttgatcatagctgtatctctgctacctagaacatatctatta[450 bp omitted]gtgatctgcccaccttggcctcccaaagtgctgggattacaggcgtaagccactgtgcccgtcccaaaaggatttttacatggtagctcataaatgtcaaaaccttcatttatctgctaaaggaaatagaactagcatttatcatgggtttactatgtgccaagagttataccggaggctgttatacacattaccacacttaaaactgtcaactttctatggcagattagtgtgcccattttgcagatgagaaagattgaagattagagatgtgaaaagcttgctaaggcacctcagcctggctggtactcagtcagtccgactttctgtttacaccactcagtggaaacagcattccactgcgtatttaattcttcatttttttcacacttattaatcctggatatagatgagactatgtattaaggtctttacatgatttatctcatttgatcctcatgtttctacgaagcacatactgctatcacctttattttacaaacgaggaaactgaggcacagagactttagacatttgcccacggttacctggttgagtggtgaagccagtatttaaacccggctctatttaatttcaaggcctctgtcttttctgcaatagcgcgctgtctccattaagaccactctctgcctcagatagaaagagaagaaaaatggctaaaacaggcgaataaagtatcattaagaaaattcatggtgacttggttcttgaaacgggaagcaaaagggcaggaggcagacagccagtctagcaccagcgcttgcaggctaggggttcacataactcacaataacttaattttcgaagatcgttcttccaggaactggggggtgagggacgtggttatgatgtatttgtgtgagtggagcccaggaaggggccggactcttggtgagcagtggctgtcagcccctggaaggcgtgctcaagccgcctgcgggagaccagcgccctctgctggcatcggaagccaccttccaacatcaagcaagccgggggggggggggggcgtgtgtgtgtgtgtgtgtgtgtgtgtgtgtgtgtgtgtgtgtgtaattggggaagcaatgagatttgaaaatttgtgtgtgtgtgtgtgggggggggcattggggaaacaatgagatttgaaaattttcatttctttttttttgagacagcgtctcactctgtcgcccaggctggagtgcagcggcgcagtcatggctcactgtagcctcaacctcctgggctcaagcgatcctcctgcctcagcctcccgagtagctgtgactacaggtgcgcgccaccatgccccggtaattttaaagttttttgtagagatgggggcctcactatgttgcccaggctggtctcgaactcctgggctcaagtgatcctcctgccttagcctcccaaagttttgggattacaggcatgagccactgcagctggctgagatttgcaaaatttctaatgcacacagtaaatacaaataatagctgccacttagcaatataacattggggtggggatcaggggctgtttaaggattttacattaatttatttactcctaaggactttacatactgcatctaacttaacctttaccctgaccccctgaattaggaattattgttaggacttcgatttttcacacgaggaagctgacagagagattaggtcatttgctgtaccgctattaagtggcagatcagaggcttgaacaagtggactctgaccttccaggtctgtgccctggaaatgaccatgttgcccttctttgggtctggagtgccccctggcaagtctccttgtacagaacctcactcagagcagacacacagcaagggctcagtgcttctgaaaatggtaaccaggctgggacttggtggtgagtttgctgctttttgtattcaagctcagggaggctgtagactcgctgggtggctggccttagaatcccctgcatctgtctgaaccagagacaagcccccagccagtgctcaggttggcccctgggatctgcttgtccaatagtaacaacattacaatagtacaacattttgtttggctacaacaaagcagacagtcctaatgaacaatgcaaaacattcagcacccagggaggcaccagtactgacagatcagaacagacagcaccccctcccaccccccagggtcccaggagacagtccctctgcctcccccacagtatatccaaggctttaacccttttacttactggaatgtggggcattggaggtggaagatgaggtcagcgttgctggggaagagtggtttgaggcagctactatttaccaatgaatatggaagaatttcaatattttaacagttggtgtggctatgctggctgaatactgccatccttactgtgggtcctggggtaatagtaggaactaactcatgggtctggtgcaggggttacacaaagaaaagcaagtaaagttcctgcttctacttcagagaggtattcagtcaatgagagttggtcttaatggcctgaacagatgtgtgtgtgtgtgtgtggggggggggttgttggggtggggagaatgagctagtcttgctgactcccgaccctgtctcaccatccattgtgttcatcctcttcaattgtagctgagtcctggaacccagagcctggggcgggtttgggggttccttaaccggtgtatggtcactttgcttcactagacacctccctgagtgtctacactcagttctacagaactggctcagtttgtccagagcagctgcccatttgttgaaaagttgaggcagccatgatagaggaagtgaaggcctggctgtggagggctggctgcgggaagtgaccatgagatgaggctctggtttatctaggaagacctctacatatgatcgtctatctattctttccacaaacatctgttgagtgctctgtgtctgctagctagtggctgtatgttagtgatcaaaacaaacatggtccctgtcctcctggcattcacagtgatacaggggagacagacagcatataaagaagcaaacaaacatatcagtgtgactataaactgtgataaatgtaataggaaaatggttaggctcacctccctacattccaacaatcaaagcaggaggagagcgtagtcatggaggtcctccctgtggaggtgatgattctattgagacctggtagatgaataggagttttccaggtaagaagtgaaaggtggggtgttccaggtagaaggaacagaaaaaaaaaatcatgacttcaactgggtggttggattacaaaagcagagagaagagaagaagagaagagaagagaagagaagagaagagaagagaagagaagagaagagaagagaagggttaaggagaaggcaggcagctactactaagggccttgttggccctgctgtggagagggttagttttattctgtgtataataggaatccattggaagcttgcaaacaggggaatgacaaaatctgatttaagttttgaaaaatatctagttggttgctgtgaccagattgtgttgagactagcttgtagaatacgaagatggaagcaaggagtccgagtgggatgtgaatattaaaaagcccccaccctcataggaaaagactgattgttctatggccttagtaatgagtaaccaccagaactggtcttaagcctaataggttaatggcaactcatctcactgaatctgcatctgaaaccaaccaatcagtgatagtctgtgctttgagaatcagccaagctgccccagattcactgcagtgagtatgtttctcaggctggtgtcacccctctctctgcttggaaaccaaactcatccccaaacaaattattccccaaacctatataagattaacagtttgttttgctcatccagactatacctgaccattgaagggctcctgtgcttaaagaagcaagaaatgcagctggttgcagacactaaggggtggttttatcctccagtagaggttgccttaggctgatcaggctgctacaacaaaataccgcaggctgggtggcttataaacaacaaatatttatttcttacagttctaggggctgggaagtccaagatcaaagtgtcatcagatttgatgtctaatgagggctgccttattagttcacagatggccatcttctcactgtgtcttcacgtggcagaaggggaaaggagctctctgaagtctctttttttaagggcaccaatcccattcatgaaggttccacactcatgacctaatcacatcctaaaagccccactctaaatacaatcacattggggattagttttcaacatatgaatgggcagtggggtggagggtagggggcacatgaagcagttatccagtctatagcaggagtctttacagtcatccaggctatggatggtggtggtctgttctcttgtcactgctgaggatgtcatcctggggtttattctctgaccctccctgggccaggcgcctatggctgacaaacccttttctgaaggacattatctttctttgaagattttatgtctttatttaggtgtaccgttgcatcttgtctcgggatgttctgccccttcaagggaatgtgtcattcggggttgagtcaggagagagaaaccacaccagttatttgaacagacataagtcaatataaagaattgttaaccaggtataaagttgttaagtaggtctctggaaaggatcaaaagaactctaaggtctcatgggggtagcgactgcagaaagcatctaccacctctagggctgaaagaaacaaagaaaagacattgaaattattaagacttagaatctggtctgcaagttttgaagaaacttgcaaactggactcagctggtgttataagaagacactgcaccgctgttgccaaggtgaataagtgatgctcaaaacaattccacaaaaagcaaacaggaaagagcaaagccttttcctcttctagacttgtagctcccttgagcactcccattagcagagactaagagagctgctggtgaagcagaagtgcagtttttcagaattccagctccagcaccacagaccagggtatggaaaggtaggtttggagctgagagccagcagcttaataacgggaacaggggacattatatttctctgtttctatcccgtttttacaaagtgtttaattatcagacgtcagcctcatttctaaaatttgggggactcatctcattgtcacctcaagtgcttctcttaagttgctttccgtttggttgtgggagcagacgcatgtacaatcagctgattcttagcaacatgtgatgcttttggtgaatgaagggccggaggaagtggcggaatgtggggacatgtggggacagttcagcctgaatggttctaatccttagaagtggcacaaggcatttgtactaggcattgaagcatgagtgatgagtagaattccaactgagttgacaaaagagtcactgtaaggtccattttacagaagaagaaactgaggcccagagagttcgtttctggagtcacaaagaaccacgtccgtccatccaactgcttagcctggagtcctaaaccattgccctgtgaccatagcttgcaatttcttcaggtttatcatcctataaaactggaataatgatatttgccttttggggtagtggtgagggttaactggtgtcatatattaaaaacataaacccattttggaagacagatgctgggcacatttccacgcccactcaccagccttgctacttgtagttcaaattcgtgcctcagcaaagttataaatcagtccatgtcatagatctgaaggtgggaggggtggtggcgttcttacatagttgaaaccaagaacataaaatccttgaatgtcattatctcagtgaatgctaataataaggataatgataataatggtaatatgcttccacttaatgaatacctactatgtatgtgccaggtattttacatatattatatcacttttgtctattcggcaaataggtatttagtgtgcaacacatgcctggcattatgttaacgctaactgccataatgaaactgagtgtaggtcttatcattcctgtttaacagatgatgaggttgagactcacccctctggcctcttttctcacttgtacaacagggacaataataatcctacctgcaggatgcatcagggaatacagttcatatagcatattgcctgggacatagcagatactcaatgtatgcttgttacttaatagattagcactactatttctgctagtgcaaccactgctcagggtcacagagctagcaaatggcctatctgactccacagcctctgctctgtcccctctgtcatgctctttatgctacgtcagtctttctactatggctgccttcccacaaaggcaggcctggctttactgtaaattctgttggaagaaaaggaggagcagccagagggcaccaagtcacagcagaaacagctgttttgaaacagaggcaggtcccaggagtagctattatcatttttttctcataaaagtgatctacggatgattgggtcaagatggcagatgggacacttaatggcagcctcgccccacccctaaatatctagaaataacagaaatgtgtgtgtgtgtgtgtgtgtgtgtgtgtatgtgtgttccaaaaccatatggaaaatcaggaaggcatatgtctccagtggtttagaaactacaaaagatgagattaaagagaagtgaaaaaagcctcaaacacaccaaggcagtaactaatgggtgtcatttcaagggtggtacatacctagagcaaagaggttggggacataggggattgatttggagcagtgcaatagaagccgtcaggcatggtgaccagctccctcccatccaccctgctttggctaaatagtaagttacataagtgtctccccgcagatggcagcagtaagtctgaatgcaaaactgtgtcctgggtgagcaggttgagaaacagaggtctccaagtccagaaaacaaatttatattctatccctggagttagactgtggtgaacagataaagcactttcagataggctgacaagaaattttaaacttcaaaataaaaacatagccaagagtcaccagatatttggaaaacccaacacatgaaacagtaacatcaaaaacaacaaaccaaagaacttacacctgaggaaacagagagcaaatagaaccagactatggaataagtatcattatataccttggacaaatggcagagcctactgtattcatattttaaaaaaataaaaaatgcatcgaggttttagaaattaaaaaaattattcttgaaataaaaatctcaatagatgggttgaatagcaaaatggattgaagagtatatcagtgaatcagaatatcatgctaagtaattctcccggaatgcagtgcaaaacaataaatagatgggtagaatgaacaaaatgttatgagacatgaatgacagatgtaaaagttccactatctgcttaatgtgaattagaggagagaagaaaattaaggaaggagagtgcctaaaacaaggcaaaaatttaagacaatttcttagaaattggaaatactcacattgagaggaaccagtgaatatttacaggaagaatgtaaaaacactgaaatgtaagtaaatcatgatgaaatttcaggacattaaggataaggaggaaactctgaatgttttcagagtgaaaaaaaattaggcaggatggaataagaagattgataccagactttacatttgcaacatagtaagtgagaaaacagaataacatgtttaaagttttctggtgaaaatacttgtgaacttatgattcttgttaaagtgaactaaatatggcctgagaaggactccatacttgtggactaaccataacctaacttaatagacaagattgaaaacctagcttaggagtatgcatctgtaacagtagctgagtcgtggccaatcccagcagccatactccaatcactcatacgctgctccgtgttccaactgtgttcagataagtcaaagccaacctgtaaccaatctagctgtttctttttctttctttttttttgagacggagtctcgctctgtcccccaggctggagtgccacggcgcgatctcggcttactgcaagctccgcctcccgggttcacgccattctcctgcctcaggctcccaggtagctgggactacaggcgcccaccaccacgcccagctaattttttctattttttagtagagacggggtttcaccgtgttagccaggatggtctcgatctcctgacctcgtgatccgcccgcctcggcctcccaaagtgctgggattacaggcgtgagccaccgcgcccggcctgtttctttacttcacttccaatttctgtgtgtcactttcctttttttgtctataaatttgttctgatcatgaggcatccctgaagtctctctgaatctactgcagttctggaggctccccgacttgtgaattgttttttcttcttgctcaattaaactccattaagtttaatttgaagtgttcttttaacattctttaaccagccaaactgcaagtgaatgtgaggacatcataaagacattttaagacacacaaacagattcaaaaagtttataattcactgtccacatagagtaacctttctcaacagggtaccactggcatttggggtggaacaattctttattgtgtaagactgatccacacattgcaggttacttagtgtccttgaccatcatccattaaatgccagtagcatttctcctccccgtgacaatacacagcagccccacatttggagggggtgctgtatcacctctggttgagaaaccatggtgtagaaaatatattcaaagagaaaataaatctaggaaaaaaaaagggatataagaagcacaggtgagcaagaaaatcagtaaagtttacttttaagtctaaataaattataacaataaacctataataataaactaaaatctgagataactcaggatggagagttatgaagtctggaaaggaggtaagagagagaagtaaaagcatgctaggagcttcattttatttatacaattagctctggatgtcaattaataatatgtgcaactatgtatacaaaaatacaaagatacagaaactaaacatatacttttcaagtcattagaagaaaagttagttgggaacaagtaaaatgctagcagctaaccaaagatcagggatgaaaaagaaacacaaaaacagcatataaaatagaaagcacaaggtaaattggtagaaaatgtgcaaatatatcagtaaccataagaaatatgactatatcaaattcgctgctaaaagacagtgactttcgaattgggtttaaaaagagtcaaaccgtgtgtttttgtataagagacagtaaaacacagtaatatagaaaggttgaaaataaagagttggaaaaggtaactgggaaaatgccaggaaaaggaaagcaagtggtacaagcaatcttatcatttgacagaacggattttaagaaaaaataatcattgttactcaaaaagacaaaaaataatatttcatagtgataaaatactcaatctactaatcagtttagccttatgcttgtgtgtgcctagtaacataggattgaaatttgtaatacaaaaacagaattataaggagaaaacaaatccatgacttcgtgggaaacattacctttagaaatctatagaacaagtagtcaaaaatcaagtaagaaacaaagatctagtaccatgatccacaaggttttattattaatattattactatttatttatttattactattttatttactattttatttatttactatttattttatttatttatttattatttattttatttatttatttactatttatttattactattgttctatcacccaagctggagtgcagtggtgccatctcagctcactgcagcctcaacttcccaggctccagcagtcctctcatctcagcctcccaagtagctgggaccacaagtgcacaccaccatgcctggctaatttttgtatttttggtagaaatggggtttcaccatgttgcctaggctggtctcaaactcctgaactcaagcgatttacccacctcggcctcccaaagagctgaaatcacagacatgagccactgcacccagcccaccaagtttaatcaaataaatttatatagagataaatgtttgcctttttcaaacacacatgataactttataaaaatcgtcctgacttgaaataatagctttttttccttttaaccttttatttcttcttttctgtccaatgatgctgcctgcttctcctcttcccaggtaacattgctagcagagtgactgtatccatctatatctttcttcatgctcataaaatcatatctaaatatatacatatatatgtagatttctcttcctatagcttacaaaaatagaaccacagtttataaatttctctgcatctttcagaaatggaagatggaagtgctctccagtcagtagacagaggtttcagttattcttgttaaatggctgcattatgtcatgatataaatgtactgcaatttactcaataattctactgtctatgggcattcacattgttttcaggttttttcctcccattgcaatcatgatcactgttgatgtgaacatccatagacacatatattctggtgtttttatttctatgggaagaattcccatgcgtgggattgccgggtgaaagaatgtgtggagttgttttcttttgatatacgttgccagattgctctccaacaaggtcacagctgctggcgatgtggtgaagagtgtccctttccagcctgtagtaggtgttatcatgttcccaatttgctagtctgatgtgagtaaagtgataactcattgttgtgtaatttacatttccttaactcttagggagaccgaacatctttttacatttattcaacatttggacttgttcttctgggaattgtctaggatagcttttgatcatttttatgctgataccatttttattctgatacgcacataggtattaaccctttatctgccatctgatttgcaaataaatggaaagatctcatcaagtactaggttgatgtaatgtcacatgttttcttctaaaatggtttcagttttttagatttaagtctttaattcatctggagctcatttctgtctaaatgacataaaataaagtcccaattttatttcttttgtctctgcaatgtccaatacagtagccatagccacttgcggctattgagcacttgaaatattactcttcagaactggaatgggctgtaagtctaaaatatacactgatttccaagactcagtatggaaaacaaagactgtaaaatgtctaatttataacttttatattgatcatatgttgaaatgtgaatgttttggatgcattagaataaataaaatatttatgtaaattaactgtatatttctttttacttcttaatgtggctactagaaaaattttaggccaggcatggtgcctcacgcctgtaatctcagcactttgggaggctgaggtgggaggattgcttgagcccaggagtttgagacaagcctggacaacacagtgagatccaatctttaaaaaattttttaaaaaaattaaccaggcatggcgatatatgccagtggtcccacctacatgggaggctgaggcaggaagatcgcttgatgctgggaggttgaggctgcagtgagccatgttagagacacagcactctagcttgggtgacagaacaagaccctgtctcaaaaaaaaaaaaagacattttaattacatgcgtagcttacattatatttctattggacagctctatttcagatgatcagttgcgccagagctatttcttaaacatttttgctctctttcacttatcttttatctgcctcatgaggggtatatctattttatgtctcatagtagacatctgtcttattcatcacttgccatcatctttgaatagcccttttctgttgggagaaattcacaatcatgagtttcacctctccagggtaggagttagacctcaaattcccaatctctctcacagttaagatatgcatatttgacgtttgtagaatgaattggaagtcagttacatgagggatcaaattctgcatggagtttttatttccataggcgcaggtggcacatgcaaccagctttgatggtggcggttccagaagaggttgcgaggtcaaggccctgcctttggtgggtggtgacagcagtggcagtttctttatcaggccagcactgggtatactttgggcattgcttaaccttgaatctgacttttcagccctcccgataatactgtgagctacttggccaggcatgatggctcactcctataatcccagcattttgggaggctgaggtgggcggatcacttgaggtcaggagtttgagaccagcctgaccaacatggtgaagcccacaaaaattggtcaggcgtggtgatgtgtgcctgtagtcccagctactcgggtggctgaagcaggagaatcgcttgaacctgggaggcagaggcttgcagtgagctgaaatcacgccactctcctccaacccgggcaatagagtgatactccttctcaaaaaaaaaaaaaatactatgagctactcaatatctttttaataaatttgctttctgcttaatcatccaaatcagcttctgttgcttgcaatatagaatcctgactgatatactgggattttttttccttaaagacatagattttggatttattttttcctggtatttccccttactatttctaaaatattatcttccatcttaatgagtttccccttcccccagctaattttcttgtcctttttctatttctcaagaatattgttttagcctggattctctagaaaacagaacctttggcaagtttgtatgccaacacctcactggggagtgcaacctcagagaaaccagattgagggaaaaatgaggcaagaaggagaagtgcaaagataagaggcattactgagaggacccgagttttgtaattaatgaagctaactgcttggactcacagtacatcttcagatcttcagagaagttgtatgaactaccctgtcttggaacatcctcaggaggagaaagtgagtagaatttaaccacggctccttcctgtctcttgtctcatcccctgtggctcaaagtctcccccacagggcattaaccctccagcacattcaggctgtattacctggtctctccagacagcagccggggaagccagagccttccagaccaatctagctagtgcaggtagtagcttgtctctccttttctgacagtgccactgtggggattctccatctatagtgtagtcaatggcagaggcatggacctcgttccatgaccagggactagcttgctgtcccctgtagctctcttctatctaggattgaaggcaaggggtttaggcctgaggttggtgagtatagggcttagggagaagatatcacagagagatctacggcagtgcataccaagtctggtacattccactttgcaccattcagacctactttcaccctcttataatatctggagcacatataagaacgatgccttcatttcgtctcctaggggagagatgcaagtcagtcctccaaggtggtgacttgttgcagcttctggcaattttagagggttggcaaaccaagtacagtttttgctgctgtaacctgttccaggatagtaattccaattcattgtcttcctcctctgctacctattctggatttccctccctcttggctattatgcaactgaaatgggttgcttcctggtggagtgactcagaccttcctcctcaagggatctgagggatctgagcccttgctcttgtctaactgtagttgctgcaaggaatttaggactgtcctttgcatggaagtcctaagagatgcccagggattccctggattctcattgtgtagcagttaccccagctcctcatgttacagggtggattatctcagcaggtaaaaccattctttctttatctgctagtcaactggcatgaatgaccaaaatggccccaaatggccagctggtttgagaggctaatcttacttccagtcctttgctcctggggatatcacactgtatattggccattaattcagtgtatgtaccatattctggaggaaagcacctcatccccaaaaggtgtcgtctccaagctggtaccttaactaaaccttggagaggccatttctgtcagtctgattgcttttgggtgatgatgtatagccttgctacttaaagtttgtgtgtgtgtgtgtgtgtgtgtgcgtgtgtgtgtaggggaccagtagcagcagaagaacctgggagcattttagaagtgcaaattctcagccagctgtggtggcttacacctgtaatcccagcactttgcaggccaaggcaggaagatcgcttgagctcagagttcaagaccagcctgcacaacatagtgaggccctgcctctacaaagacaaaaaaattagccaggctcagtggtgtgcatctgcagtgagctgagctattattccaacagtgcagtctatcctgggtgacagagcaagaccctgtcttaaaaaaaattgcaaattctcaggctcccctccagacctactgaagcagaatctgcattttaacaagattcctaggtgatctgtaggcacattaaagtttggtacctggtttacatggtaagacctatgtgatgttcactgaagcagggcaatggttgatgtcagaggaggaagcgtggggtacagggttgctatggatctgtagcaatacataaactgagtcatatacaagtattaagttcatttattgacaaagttacttaagcctatacaacttccattgactgcagctttttctgtcttccattagcttttgaatgacgaggtctcctttccattgttttccagataatttgtaattttattttttatttcctttgatccaacggttacctaacactgtatttcttacacttaatttccaaatcagtagcatattttggtaatattttaaattatttacttctctttttattggatgatgaatggaaaagatagcctataaaatacctaatttatttaatttttcaagattttccttatgacccaataggaaataaattttggtaaatactccatgtatgcataaaaatctatattcagtagttgaagaaatacttatttgagtttgctgattctatttttaatccttctacgcatccatttttcctattagagctactgactttgaaatagacatgttgaagtctcccatcgaaattgtatttttatgaggctctctttatatttctaatacttttttgctttctatatttatttgctatgtcgtttggtgcataaagttttatgctcattaaatcctcttcttaaattttgtagtaataatatccctctttatccagtttggaattttattcctaaaatccaacccatgtgatgtggatattgctactcaaactttttgtttgtttccagatcaaaactaatttttggatcctgaacacactgagcaagaatatccgttgtggccctgagaccagctgcactggctgggttggtagtgtctccctctaaccctccttttaagtttctcccaggaaagatgcccacgggaatcctggagttgtagctcctggcacctaagtgaaaaagtggctctgtgtggcaaacgggcagactgtagtggacacttggtgtactgcccagattccccctcaagagtgaaggacttatttctatagctgctggcagtgttgccagcaaatagccatcagatatcagctcttttctggaagtgcctgggttgaagagtccaggcttacccaaggtcacgccctctcccaagacagttcatgccttattactggtggacatgaaggcacaaagccccagctcccctcactccaacttgggacaaccctgaagtgccattacagcttcaaagctcctcaaggagatggctgttgcttttattgaatctgtatcacagtccacttcctcactttgcctgatccttcttccttccctttccaagatgttgatcccaagagctcgccttaataaatttcctgcatgcacatctctgagtcttccttctacggaggccagtttatgacaattggaggttgtccttattcttaggggatgtatacttaagagtgaagagtcataacatgggtaatttattttcaaattattctggaaaaatgtgtatgcatatatgtataaaaaggagacagagataaagcaagtgtggtaacatcttaacaactggtgaatctggatgattcatatacggatgtttattgtagcattcttctgccttttctgaggatttgacatttacaaaatatcaaggtgaaaacaaaatccctttcctctatttttaataggtgtttcagtgggaacaaaattaggcttgtatattcaatctgtatctttacctgggacctcttcattatttttaaacctttgttttgtttttctaatacaattatttaaatctgtacaggcatacctggttttattgcactttccagctattgtgtttttataaattgaagaattgtggcaacactgcatagagcaactccaccatttttttctaacaccatgtcctcacttcatgtctctatgtcacattttggtaattctcacaatatttcaaactttttcacgatgattgtatctgttacggtgatttgtgatcagtaatctctggtgttactattttaattgttttggggtacgaatgtgcccatatgacagtgaacttgatccataaatattatatgtgttctgaatgctccacttaccagctgttcccttatctctatacttctctccttgggcctccctattccctgagacacagaatattgaaattaggccaattaatgaccctacaatggcttctgtgtgttcaagtgaaaggaagtgttgcacatatctcattttaaatcaaaggctagaaatgatccccacaagcacaagtaactaaagcaaaaatggacaaatgggtcacattaagttaaaaagcttctgcccagtgaaagaaacaacaacatgaaaagacaacccacagaatggatgaaaatacttgcaaactatccacatgacaagggatcaataaccaaaatatataaggagctcaaataactctataggaacaaaatctaataatctaatttaaaaatgggcaaaagatctgatgaatagacatttttcaaaagaggacatacaaatgagaagcaggtgtatgaaaaggtgctcaacatcactgatcatcagataaatgcaagtcaaaactataatgaagcatcatctcaccccagttaaaatggtatttatccaaaagacagacaataacaagtgctggtgaggatgtggaaaaaggagaaccctcatacactgttggtgggaacgtaaattagaacaattcagaggttcctaaaaaaactaaaaatagagctaccatatgatccagcaatcccactgccaggtatatacacaaaaaaatggaaatcagtatattgaagacatatctgcattcccatgtttattgaagcactattcacaatagccaagatttagaaacaacctagtgtccatcaacgatgaattgataaagaaaacgtggttgatttatacaatggagtactattcagtcataagaatgaacgagatcctgtcatttgcaatgacgtagatggaactggcagtcagtgcattaagtgaaataggccaggaacagaaagacaaacttggcatcttctcacttatttgtgggagctaaaaattaaaagaattgaactcatggagatagagagtcaaaggatggttaccagaggctgggaagggtaattgggagaggggtaggggagtgaggatggttaatgggtccaaaaaaatagaaagaatgagtaacacctgatatttgacagcataacagggtgatgacagtcaataataatttaattgtacatttaaaagcaacaaagagtacaattggattgtttgtaacacaaaggaaaaatgcttgaggtgatggatacctggtttatcctgatgtgattattacacattgtatgctagtatcaaaatatcttatgcagcccataaatatacataactactatgtctccacaaaaattaaaagttaaaattaaaaaaagagaaatgattaagcttagtgagggaggcatgttgaaagccaagaaaggtcaaaagctaggcatcttgcaccaaacagccaagtggtgaatgcaaagaaaaacttcttgaaggaaattaaaagtgctaattcagaacacatgaatgataagaaaacaaaagagccttattgctgatacagagaaagtttgagtggtctggatagaagatcaaaccagctgcaacattcccataaaccgaaaccgaatccagagcaagcccctaactctcttcaattctatgaagacagagaggtgaagaagctgcagaagaaaagtttgaagttatcagaggttggtttatgagggttaaggaaagaagccatctctatagcataaaaatgcaaagtgaagcagcaagtgctgatggagaagctgcagcaagttctccagaagatctagctaagatcactgatgaaggtggctacactaaaaaacagatcttcaatgtagacaaaacagccttctattgggagatgatgccattaaggactttcgcagatagagagaagtcaatgcttggcttcaaagcttcaaatgataggctgactctcttgttagtagctaaggtagttggtgactttaagttgaagccaatgcatatttcccatttctcaagtcttagagccctttagaattatgttacatctctttggcctgtgctccataaatgtaacaacaaagcctggatgacagcacatctgcttatagcaaggtttactgattattttaagcccactgttgagaactgtgctcagaataaaaaagattcctttcaaaatattactgctcatcgacaaaacaccaggtcactcagaaactctgatgaagatgtacaaggagacaaatgttgttcctatccctgctaacacagtatccattctgtagcccatggatcaaagagtaactttgactttcaagtcttattatttaagaaatacattttgtaaggctatagctgccataaatagtaattcctctgataggtctgggaaaaatacattgaaaacctcctagaaagaacttactattctagattacatcaagaatgcttgtgattcaggagaagaggtcaaaatatcaacattaataataatttagaagaagttgattccaacttttatggataactttgagagactcaaggcttcggtggaggaagtaactgcagatgtgatagaaatagcaagacaactagaattagaagtggagcctgaaggtgtgcctgaactgctgcaatctcatgagaagactttaatgagtgtggagttactttttatgaatgctcaaagagagcaatttattgagatggcaactacttctggggaagagtctatcaacatcgttaaaatgacgacaaaggatttagaatattacataaatttagttgataaagcaactgcagggtttgagaggattgactccaattttgaacgttctactgtgggataaatgctatcaaacagcatcacatgctacaaagaaagctttcatgaaaggaagagttgattgatgcagccaacttcattgttgttttattttaagaaattgccacagtcaccccgaacttcagcaaactaccactcacatcagtcagtagccatcaacactgaggtaagaccctcccaccagcaaaaagattacgactcactgaaagctcagatgatcatcaatattttttagcaataaagtattttaaaattaaggtatgtacatttatagacataatgctattgcccacttaattgatgacagtatagaggaaacataacttttatatgcactgggaaaccaaaaaattcatatgactcacttaattgcaatattagctttattgtagtggtctgatactgaagttgcattatctctgagatatgcctgtatatcttcctttgaatgcttcttcggtcatagttcacagattttttattttttgtgccctcattgttattcattagaaataatttataatttctactttaatttttcttttgaacccaatagatagttaaaagagtaggttttgaatattcatgtctataggggttttgttggtaatgaggtttttgtttgtttggctattctttggcgatttctagttttattgcattgtggtctgtgaacacatttctgccatttagaatatagtggaatttcctctgagaattctgcggggatggttgttgaatacatctgtgctgccttcatccttcaatttaaaaccagctactgaaccttttgtgagccaagcagcttctggggtttagagatctagtgcatctctggggtccagaagaagggagttggcagagcaagtttctgcttctgagccccacgacagcccggggactggaggtgcagagcccaggagtaatggtcagaagaaaagtgaaatcgggaacacttgacctacggaaatccaaggacctcccaagggagaggctgcagctgcccccgtgagcactctatggtctcattgttccagctcatacaaagctgtgggggagaacaaaagtgctaaatcctctcctcaactgggaaaatgccagtctttgcagctgaagagactagcgggcagagggagaccttttgggaccaaccacttgccagcggacccagcaagtcaaagactgttgcaacatccattactcgagagactggccttgctctagatccccagcagctgaacatgggccccagtgggtcagcaaaggaaaataccaacccatcctgggggacccagaagtgagaaagtgaaagaaccagcatattgcagagaacaacagctacaaaccttctgggggagagagaggacagcctgaaccaaaaacaatgataacaacaacacgtaaggaaccacaaatacagtgtgcataaacgcacgcatacacacacgcatgcacacacgcgcacacacatgcatgcacacatacacacatgcatgcacacgcacacacgcatgcacacacacacatgcacacacacacacatgcacacacacacatgttctggatctaaagaatctcattttcagactaaaaatttcaagagatgaatcaaaggattgcagagtcactgttgaaacctgacctagaatgccaaatggagtaatgaaacaaaacacaaatcaaaaatgcaaagagaggaaaattatgaggtgaaataaacagtttgaggaaatgatgcaggcaatcaaatacttgcatatttggattattctatgttggaattattattattaggataatagaaatttgtaaaataaagcagatggaagacaggcaataattaaacaaataatagaggaaattgtccttgaaaattttccaataaagacttgatctgagatttgaaggacccactgaattccaaacagaacttacacaaaataatactcatctttagccatgtcctgaaaacaatgactgaaatctcaagtgttaatataaaagcttactcatttctagagagggaaaataagtaacttacaaagaaacaatgagatgtcatttgacttctcatctgcatccgtggaagcaaactatgctgtaagtatatctacagatttctgagagaagaggaatcctaaaagaaagactaatagtaatgtcagactgtaagtcctgaaggatctcagcctagtatttagggaaggggtggaagaagatggaaggtaaaagtgtttcaatatctttgcgggctgaggatatagaaaaatactacaaataggtctctttaatgtggggaaatagatgcttttctcacataatggaggattatataattgcaattgtgtattttattctgaatgtgaaaaaaatacagataaccactcatggcatggaaaagtatagcgcttctctaagaaacctataagaatctataagaaaatctaaaagaaaaaaatctacaagaaaaaaaaaatctaataaatggccatgttaccaagccatcaaaaacaagaaaaagagagaaaggacaaagtaaaataaatagtgaacctgagttaaaatggaagaaatgaaataaattatatccaggtttacacaaacctcaaatgagccgaattctcccattaaaactcaaagttcattaaataggattgaagaacaaaaaccagccatatgctgttgttagaaatactatatcagtcagaattggtgtaacagaaacccaacttacagtggtttaaatatgtaagaaatttaattttccttgcagcagagagctgccgatataggcagctgctcagaaaacctctacccttttccagcttccctcaccctcagcacctctgctgggcttggtagcttacctgatggtgtgaccccaaccttcattcctaagcgatctgagcccttcttggtcaccatgcctctcatgtatgaggccatgatggatgtacgtgtccatttaccatcaaaactgggcacctgatccatataccaagctcaggctccttcctcctctgttggctggtcataaaggacccttctctccaccccatgcagccatcagtatgagctgagagcaagacaacaggtggatgagatgggggtctggttacctgctcacgcagctcgcttatgccatctggtcctccttctgctcaatcctccatgtcccacttctattctggcatgctgctgggcccacctgatcttatgacttggttgatctgacaaatatctgactcattgtggatagttttggctgcacaatcgtttgctttcccgtgatcgggtgttccctccctccggggccaagtagccctcaggagcttgtgatggttaattttaggtgtcaaccggactgggttaaggaatagctagagaacttgtaaagcatcacttctgggtgtgtccgtgagggtgtttccagaggacagtggcctgggactttgtggactgagaggaggagatctgccctcattatgggcaggcaccatccaatcagctggcacccgcatagaacaaaaaaggcagaaacaaaacaaaacaaaacaattttctctctctctctctctctccctccctctcttcttctctctcctggagctggaacacacttttttctcctgcctttggacatcggaactccaggctctccaggctttccagactctggacttaacagcagtctctggacttacaacagcagccccctggatcctcaagcctttggcctcagactaataattatatcagcaacttcctggttctgaggcttttgggcagccatgctactagcaacccagcagttccagcagaaggcctgttgtgggacttctcagcctccatgagcatgtgagccaattcccttaatacatctatctctttctaaattgatttattgatctagaaagattgatcctattgattctgtctctctggataactctaatacagagctatatatcaaagagtgtgtaattctctgatgcagatgacatgacttgctccagaaccctggggatctgagttgtgattttcccagtgagacttgccatatactttattcaatgtcttttctgaccaccaatatctctaataccatagggcctgctaggtcatgtggccaaagcttcaaggatacctgctttgcaggctggacctgctgcagagctcttttctactcttggtgcctctcaaaggcagcagcttttccttttaccagatatttggatcagagcagtattctcatgtttggaatgtgctgcctctagaacccaaagaagtctataggcatggcactttcttcttggtggtgatgggagatgaaagatagaaaagttttgcccttacttttgagggaacgttctagcatgcttcagaacatggaactcaattttttaacctatttggaagtccttgcacttttgaagagtttagtcttgtaccctctgaagtgcttgtgtcttaccaagtcctacatgttctagccacttcacccggtccaattagcatatgtcatcaatagaggggaccagtgtgatattctgtggatgtccagccagttcaggcctcttcatattatgtcatgacagcaccaaacagttgagataacccctgggaaagactgtgtatgtgtactgttgtccactccaccaaatgtgaactgcttctgatactgtttttttgatagggatggaaaagaacacattagctgcattgatggctgcatgccaggtgcccaaggctgtgctcatctgctctagcagaggtaccacacatggcacagaagctgcattgaggccactgtttggcagagtttgcagtagtccactgttatcctccagaatatgtctgggttttgcaggggcaagactggtgaattacacaagctatgagtggactgccacctcagcatcatttaggtttttaaggatggctctggtctctaatattcctctttggatggatgtgacattttaaaaagtgtactcatttggttgggttggggtgttgggggctatttcagaggcttccactggtcttctttactctgatagctcctaccccatgggccaagggaccagcatgggagctgtgccaattgccaacatgtctattccaattggggactggggagatggccatggggttggcccatgggtctagtgaacccgctgtaacccagacttcggccaggatcccatttatttcctgcccttcatatgccctcgatttaatagggaggctacgatgatgctttgggttcctgggtaaatgtcaatctggaccctgtgccaatagttctcgatgtttgagtgttcctctttctccagcgtgtggccatctgtcatggcatcacagggtcctcctaggaagccagcctctccttcaattcatgtgctttaaacactaaaactggttctggtctggaaactaagtgaaggagtgtgacttttttttgaggagtgatcaccctcaactacctgaccaggaatgttaaattgtagaaaatgtgtatcttagtggtcagacatttctatgtataatatgcacaagaaaaagactctctaggcatacagcagactgtcagccatacctacctctctgtggcaatattatgggccatttaactttatccttttttgtttgtttgttttttaagacagagtttcactctgttgcccaggctggagtg[133 bp omitted]gcgggatttcaccatgttgcccaggctggtctcaaactcctgacctcagggtatctacctgcctcggcctcccaaagtgctgggattacagacatgagccaccacgccctgcctaactttattctttatactgaaggagttaaaaatatgccactctggcatagtgactattttgagttaaaggcacttgaaaaacagcaggtacaagaagattgccttgatcttccttctgttacttaaaagcaggacataaaattcccatgtgaaagatgccctccctttaacagaaagaaagtaacattcttatcaaggacaggaaggtgaggtcgtgggaaacctttacacacagacccggttcaactaattcctatcttcctagtcacttctccacctgatcaatgaccctagccccagtacctttgcctcgtcccactttcatgacttatgatactttgtccatttcagtttataagcattcatctctaacagcgtctttgggcctttgtttccttatgaaggctcctgtgcaggtaaaacttgcattaaataactgtgtgtgcttttctcctgttgatctgtctcatgtcaatttcattttcaggcccagttagaaaagaactctaaaagggtaaggtaaaatttttcctctcctacaatactttaatgtatttttcacatttttatattatagcaaatatattctgtcatgccagagattacatatgtaatatgtgttttccatcctctggagagatgttccagaaaattgtcttggcctaactggatgtggttgtcaactccctgctctctgaaggatggatatgaatatttgacatctcttaagaagtcttcctaggaaagaatccttttgaattacagaaagtggctccctcccccagagaggccccactgcctggggaaagagactttaatcagcccctttgttaaaaagtcaaacaaacgcttgccataaaacccagtgattctactcctaggtactcactcaagagaaataattttaaaaaattaatcagatgtggtgatctacacccgtagttccagctacttgggaggctgaggtaggaggatcatttgagccctggaggttgaggctgcagtgagctgtgaccccatcactgcgttcctgcctgggcaacagagtgagatcctgtctctaaaaaaccaataataaaaaaagagaagtgagcacatatgtccatacaaaaacttatacattcatagtcatagcagctttattcacgacagccccaagctggacacaacccaaatatccaccaagtgaatgaaagaataaattgggctatgattccacttatataacaccctctagaaaatgctcactaatctagagtgacacaaaacagatcagtggttccttggggattgggggatgggagggagggagtatgaaggagcaagaggaaactctggggttgatgagagcagagcactggaacttaagttctccctggggtgggggtgaggtgcgtgggatgttttaaacaatgacaggacctgcagttagaactgctgaggttggacagtgtcatgcgtaccccacgttccaggaaagacttatgtgtccctaactccaagtgtgtgacaatgatggtatcttctcttgattcatcttccctcatttcagtgttgctcaacgcttatttttaaacttatagctcctccaaggaaccattttacatttttttttaattgtccacctccccatgaaaatataatactggccaggtgtggtggctcacgcctgtaatcccagcactttgggaggccgaggtgggtggatcatgaggtcaggagatcgagaccatcctggctaacacggtgaaaccctgtctctactaaaaatacaaaaaattagctgggcgtggtggcgggtgcctgtagttgcagctacttgggaggctgaggcaggagaatggcatgaacctgggaggcggagcttgcagtgagctaagatggcgctgctgcactccagcctgggtgacagagcgagactctgtctcaaaaaaaaaaaaaaaaaaaaaaaatatatatatatatataaaatactgcagatatactgtgtgtctgtttacgtactgtggtctcctggagggccacaaatagacgtaacagctaagatgttgggggcatcctaagaaccaatgttcattcctgtgggggctctcttgacctgttgagaaatcatgacttattcccatcagaaaaaaatccaagtaggcagggaaaaagcagtattgtaatgaaaatgtaaagctatctgatttgactctttgatggaagcgtagtgacacacataactgcaaaaaagtgtttcgccagagctatgcattgatgtaggttcatgaaaatgggagcccgaaatgaggcaaaggggttggcaggcagagagctttcaacccaggcagagaagtggcagagtcttttctgtgcaactagagctctctgctgggcatttcaggaacatcctccaataaattgaatgcagcccattcatttagcagctgtttgcccagcatccatcacaggccgtgcactgagagctaggcttgggtttgtggcccagcaaagtttaataactgggtcagaaccacacagtggtgagaagtcacaatggcattcagagtcacttttctctgactccaaagcccacagtcccctcctctggagttcccaagccaggttcttactggctttagaggggagtcccctccctggcctctgagacagaaaggaagatgaggggcaggtaggagtagggtagaagtttgggatatttagggcattatcacctgatgatttcccttttctcctagaagttggagcagaagaggagtgagaatgacttgggttaagtcttgcggtgctggctttttgcaaagggctgttccacaaagactgagaaaaaaactgaggctctgtagaaacagaggcagaagtggcagaagaaaatcttgatgcttccccagtaaattcccatcaattgtagaggttaaagaaaatgtggtacatatacaccatggattatgtagccataaaaaggaacaagatcctgtcctttgcagggacatggatggagctggaggccattatccttagcaaactaacgcaggaacagaaaaccaaatactgcatgttctcacttataagtggaagctaagtgatgagaacacatggacgcatggaggggaaaaacacacactggggtgggggtcaaagggcagaggtgggaagaaggagagcatcaggaagaatagctaatggatgatgggcttaatacctgggtgatgggatgctctatgcagcaaaccaccacggcacatatttacctatgtaacaaacctgcacatcctgcacctgtacccctgaacttaaaataaaagttggaaataaaagaaagagatactcaggtaagactaaaccacacatgaggaattggaaccagggtcctgtgagtctaactcgcatggctcaggagggttggttcccctagggagctgctccttcctcttggtgcagtgtagacagggtgttaggaaagagccccaggctcactgaggatggccaggagtaaacctgccatggctctagaggtccccaaggcaggcaacggatgagagcaagacagtttctcactccaagcgcagcaagcagcatgtgcatctgcagagctgcgctggtttccctgccctcaggtcccacaggcgacgccatgggctcggatggatgctacccactccatgggctgccgtgaagctgtggaactcaaggccaaaggttcagcatactttgagaaagcagcaaacactgtggcaagcagcaaataagccagtctctcccctagggagcaagcagtgacacaggaaacacacggaggtctcctcactcagtgtacaggggcctgcgtgactagctgctagttgtttattacctgtgagcaaccggagacattatgaagacagcctgaggtctcatccaggggcaagggaagaactagccctatagaacagatttaaagggacagtggaaaataaaaataaagctgctttataattttataccatgagtaccatgagtcatgtttggtcaggacatggctgggacagccttgctgggaagcagtgggtgatgtggttcctcgccatggatgagcaccctagtgggctaaggtgcactaagtcagtgcctagggtccacgcgagtagtatccatggaaccccatgcaacaccagtgccaaggaccagtttctcccaggagcaggaggcaagataattattgagacaatctctaccaagatgggatggagaaacagcattctctccccaccactgcctcagcagtgcatctgtgcacccctccgtcccccaagttcagcattcatcctaaagaggaggaggtgaaaggagaaaaaacaattctgactgtgtctgagttctccatctgaaaagactcagaagtctctgaatttgatttagtttatcagtatgggactagattaggccttcttcataaagcagaatgaggatgcagagtcagacatgcagctgcttgcataactagctactagttgtttattacctaagagcaatcatagaggttatggggactgcctgcctgaggtcccatccaggtgcagggcgagggctagccctattgtacagatttaaaggaataatggaaaataccacaccaattgcactcctagacatgtatcccagagaaatgaaaatttatgttcactccaaaagatggacatgagtgtccatagcagctttatttgtaacagccaaaactgaaacaatctagatgtccttcactgggcaaatggttggttaaacgaagtggtgcacacgcactggggaataccactcagtgataaaaaggaaagtcatgttgtggaaagtcattttggggggccatgattttgaaaatctgtattcactacaaacataaggtagatgcctcagtgctgtaggtgatttatttcttttcttttcctcttcccttctccatcccagtagtaacagctaacccacattgtgcgtggatcattgccaagatccctttttaatatattaaatttcatttttagataattgtagattcacatgcatttgtatgaaatgatacagggagatcctgtgtacccttaacccagtatgctccagtggtaacatcttgcaaaacaatatcacagccaagatattgacaatgatacagtcaggatacagaacatgtcaatcagcaccagcatccctcatggtgccctgttgtagccaccctcccttccttccaatcacaccccctctttagctcctgcaacaacttatctgttctccatttgtaaaattttgtcatttcaagaatgctatataaacagaatgatactgagatgggaacagcactgggtggtcgcaggaggatggaaaaactcaaaaaagaactagccaaaggcagggtgcggtggcttatgcctgtaatcccagcactttgggggcagaggcggacagatcacttgaggtcaggggttcgagaccagcctggccaacatgatgaaacccctgcccctactaaaaatacaaaaattagccgggcgtggtggtgggtacctgtagtctcagctactcaggaggctgaggcaggagaatcgcttgaacctgtgaggcggcagttgcagtgagctgagatcatgccactgcactccagcctgggcaacagagtgagattctgtttaaaaaaaaaaaaggaaggaaagagaagaaagaaagaaagaaagaaagagagagagagaaagaaagaaagaaagaaagaaagaaagaaagaaagaaagaaagaaagaaagaaagagagggagaaagaaagaaagaaaggaaggaaagaaggaaggaaggaaggaatcagtcaaagaaacaagaactaggcaaagaaaccatggcataacagaaaacccaaaataagggaaagaaaatggctaaaactctggtcagggtgacaatgtccatgactcttccaggcaaaaccaagtaaggcagaaagagggtaataactggagtgggggggtgtatccctgaaatcccctccttttccaggatattccaccccttaattaaagaaacactcataaaattagacacccaaactccattacttgtgacttattctctcaagcaggctcacacttctctcttaagtgtgtactttcaatttgcaataaaagcttcttgcctttggccttattctgactcatccctgagctctttcttgtgatggtgccaataatctggacaccagctggagctggggccttactggcatctggagaccctcctgagcccttgagcaccaatacagtatgtaacttttttgactcagcacaattctctggcgattcatccaggctgttgcatgtatcagtagctcattccttttgatcactgagtggcattctatggtatccacgcaccacagtttgtttaacccagtgaagggcatctagattgttttcagttttgggttattacaaataaagctgttaggtacatccatgtctattttttagagtgaacacaaattttcatttctctgggataaatgcccaagattgaaattgctggttcttatggttgtagttgcgtagtttttaaagaaattgtcaaactgttttccagagtggcggtaccattttacattttcattagcaatgtacgatggtctcgtttctccacatcctcaccagcatttggtgttgtcactattttttattttagtcattctgatggggatgcagttatagctcattgtgtttttaatttgcacttctctaatggatgttaaacatcttttcatgtgcttacttactatctatatatcttttttgataaaatgtcttttgcccattttctaatttgattttttttttctgttaaggtttgagaattccttatatcagaggatatataataatatttgcaaaccatttatacaacaaagtactggtacattttaggtactagttctttgttatatgaatggtttgcaaatattttctcccagtgtgtagcttgtcttttcatccttgtagcaaggtcttctgaagcacaaaaattttaatttgatgaagttcaatgtttccttttatggattgtgcttttgttgtcaattctttgcctcactatctagatcccaaatattttctcttattttttttgaaagttttatctcttataatttaaatctgagattgatttcaagttaattttaatgtaaggtgtgagacctagggtgaagttctgttctttctctctttcttttctttcttcttcttccttcttttttctttttttgctcatagatgtcttactgttccagcaccaccttttttgttgaaaagactatcctttgtccactgaattgcttttgcacttttgtaaaatgtcagttggacatatttgtgtgggtctatttctggattctttgttatattccattgatctatgtgtctatccatcctccaataccacatagtcttgattactggaaaccgattcctcccattttattattctttttcaaaattatgttagctattccagtgcctttgcctttccatacaaactttcagatgatgttgcctgtatctacaaaaaatcctgctgagattttgatagtgttactagggcagccccagagatacagccgaaaaagctcattattttcttaaacagtagataactgaaaaaactcattttttttcttaaattttttctatttctttatctataggtaagcttgcttaaaagaactccagatggcccgggagctgcaggaccctttgccaattatcagaggaagataaggcctgtgtgaaaccgggacaaacctgaaccagcgaccccgtgttacctttagatcattaacatatcatcataatgctaaaacctcacccatagaagataattgctgccattttctgaatatacattatatgaagaagcatgttcatgatctgcacctgcacatctggagttcctccccatacatgtttacgtacctccctgccccacatctaactccttaaaatcccccagcttctcatatctcagggagaaggagtctttagagaaagagctccctcctccattcctggccaggaataaaacctgcttgccttttttcccaattaggtgttacagtagaactcagttaccctgtaacaataagaattgcattaaatccttatatcaacttgggaagaattgacagctttaccatattaagtcttctaatccataaataagtatgttcatccatttttttagatttttgaaatttctttcatcagcattttgtagttctttgcctcactatctagatcccaaatattttctgttttttttttctgaaagttttatctcttacaatttaaacctgagtagttctcagcatgcaagccccatacatgttttgttggatttaaatttaagtactttggtttttgataaattgtaagtgctactgtattttaagtttcagtgcccatgtgttccttgctggtataaagaaatacaacatattcctgcagtctagctgaagtcacttatcagctctaggagtttctgttttttgttttatttttggtagatctttgagatttcctactttgataagcatgttatccacgaatagggacagttttattactacctttctgatctgtatgccttttatttccttttcttaccttattgcattgggtagaacttctaacactgtttaacaataatggtaagagcagtcatccttgcccttttcctcttctcaggggtacaaccattcagtctttcactgttaagtatgatgctggctgtggagttgttatagatgctctttaacaagttaggacaaattccctctatttctctttttctgagcatttttaaaaccatgaatgggtattttgtgaaatgctttttctgtattgattggtaagatcaattttcttttgtatccagttagtatgttggattatgttgactgatttgtgaatagtaaaactgccctgcattcctgcagtaagcttcgctgtgttacaagatctttggggtgttgcttttctggccagaaacctctgtggccagtggtgcctttgcccaagttttgtttgggctcactgggctcattccgcccactcggcctggcaggctgtgctcagctcatgctaccagcctggaccccatgtctgccaaaggcaagtcaggcatggagtggcaaggggtgtgtgagtgagcgtggggtctggccactgtgcagtcagacatgtcagctgctgcagtggggtgggcagctccaggtgctggcacaggcactagtcctctgtgaggctgtggctgagccaggcacactgcacgcagcttccacagctggtactggggaacaaagtggtgcctggaggcttggagatgccaggaaccacagggctcccaagaaagagtcatagccctggcttggggagctcccaggtctgggcttcccgaagggccatagctattctttctttctcttcaccctcaatgtagtgagcaaggggcatgtttcaaccctgtttgtgttacagctcttttagccctaccattcaatgggtcccaagttcttgtcctataaccaggaagaatgaggtacccagacaagtggagggtgagcaagatgaaaaggagctttactgagcgacagaacagtttggaggaaacccgcagtgggtagctcctttccacagccagggtgtcctgatgagtgttcagctcctagcaaagaggaggccctggagtgggaagctcctctttgcatgcaggtggtcacattgtctctgcagctctcagcagagaggaggccctggagtgggtagctcctctctgctgttggtcatcctaatgtctgctcagctctggttgagcgcaggggtattatgggcttcagaggggggaaagtgtatgccaactggtccatgggcaggcccagaaaaggcaccacaagctcccactctggtctgtggggctggcagcccgacgccagccttcaggccctccctggcctgaaggtggggcctcactggggacctgcccccttctgcccaggagcccatctgcctcctgccactgcacatggcacccaggctgctcacagcaaggggcacctacaggccagggcaagccgccctcaacttcgtcattgtgtatacttttttttacattgttgaattctacttgctaatttaaaaaaatgttgcatctatattcatgatattagtcttttgttttttgtactatcttttttttttggtttgagtatcagatttagtactagcttcataaaataaatgggaaagtctactctcatcttcaattttctggaagagattttgtagaattagtgttaattcttttttaaacttttggtagaattgtccagtgaactctcctggtctaggagctgtttttaaattttagttttaaaattacaaattcaacttttaaaattccatttcatactgggtgagttgtagtttttgaggaattggcctgtttaatttaagctgtcaaatttatgtgggtagagttgtttgtagtattcccctactatccttctgatgtacacagagcctgtagtgatatcccatttcatccttgatgtttcattccgtttcaccctctttcttttctctccttattactggttgtgggaatgggaattccagcttctccctaggcctctactaagacctccctgacttgggggacagttgggtggggcggctcatgactgctccccaaggggcctccactgacacaaggggtggtggcctcattaccactagttggtggtgaaagtcctgatccccctctgggttttctggtacactgccccagcagagcagagaggggcacctcatgactgctggatgggagtggaagtccagactcccccactgtcttcactgatattgcagggagcccatggggagagttggggtgcctctttacagcctggtgtgggtggaattctaggatctccacctctgcctttgcttgtgtgagtgtgggtagggccacagtctttctgtggtgttcggctggagtagagaggttattgtctcaaggttttctgtctcgtaaggctgcccattttctgctttctgttttgtttttgctttgtatagagggagtaggcttttgatggggcttttccccccatctcaaacactagaatttccaggtcgcgagcttcttcagttctaagtctgggatatatgaggcaaaatgaaagccaggagaatgcactatgcggtcccaagtttcctagctggtctgccttcttttctcaacttttcagaatatttttatacttgctttacatacaaactaaatctactgaaaaaatacaataatcaaaataaatggatgggctcaatagccaatagaggagacagaggaaaaaaaaatcactgcactgacaactataactagagaaatcacccagactgaaaaacagagagaaaataaatggaaaaaaatgaatggagcttcagggacctgtgagactatcacagggtccagtgtttgtgtcatcgaacttgcagaaggagaagagaaagaagacaaggctgaaaaggtattcaaagaaataatggctgaaagtttcccaaatgttcagagtttttagttgtccttactgggaggaatagggagaagcgtgtctgctctatcttcctgaaagctaaagaaccaagcactgctggatggggacccagggtctccaagctgagaagaacactgataaggcatgcacggaagcagtcctgggaggactctgccacaggcacaaacaccactggacacccaaagtcatactgctgggcgctggagtccattgcttcttctgagaagaatcgctaacttttctcgggtctttgtacctttagcccctgattcaaagtcttagggaggctcacctaagtggccagtcgcagggagtgtgcccagccctgcctgtcagcaggtgtggaaaggaaatgtacagcattctgcagcatccctggtggaagctggagcctgtcttccattaagccgtactcactgtgggattcctcaatttgtccaattaggaggtcagtgcatgaggttgctgtaccctcatacccccgcaacactcagttttactgaacttcctaatatttgccaatataataggtgtaaaattatatctcattcttgcatcaatttgcatttctgggattattaacatttgtgagcacctctcatatgagtgttagcttttgagagttctcattctgtaaattgcctgtttatatcctagatatatttatgtttactgtgcttctgaatgggagcttattttcctgagtcttacagacatttgagacagttacattataaaagtatattgctgagtgaagggataatcataagacatagttctttaataattccagatttgaaaaacaaccatattaaatgttattatttgtgggaggtgagattatctgacatttgtttctttttcttctcttctttcttcctcttcctcttcctcttcttcttcttcttcttttcttttttttttttttttttttgacagagtctcgctctgtcaccaggctggagtgcagtgttgtttcttcttttgaatggatacattcaactttacctgagctctttgctccaggaaaataggaatggataagaaatgctccactcttgtgtgtttcaggaaatggttaattgcaaaaaacacgccttccctatatggcttagaccgcccttcccttaatgactcccttgtgttataaaaccccaagtcttttttaaacatgtttctaattaatgaacattctctctattgcagtagcctacatacaaccatctccttaattgtcaggtgcatatgtcctacacacattttatttttttaaatataattttcatacataatgattgcagtttctataaacttttgaaaagtactggtcaagtattttgtagaatatccctcaatttgggtctgtctgatgttttctcatgattaggctagagttatgcattttgggaaagaatgtcatggaggtgatgtatccttctaatcacttcatatcagggagcatatgatatccacatgacttgtcactggtgtcattaaccttatcacttggttctggtagtgtctgccaggtctcttcactatgaaggtactattttcctctttccatactctattcaccaaatataagtcaccaagtgcagcccatactcaaggggagggaataaagctcctcttccttgtatcagaatgtgtaaagatctcttaggctttaaaatctatatattattcagttgcttctcctgttccgctttttatttgttagggaaccagatcctttgtcctacttccccacacctaggcttgctgattgcatctctgagaagtcatgcaacatgttcctttgttcctgccatttcatgtacattggtaccagaggcttgattagctttatttatttattcatgatggagtctcgctctgtcgcccaggctggagttgcagtggtatgaccttggctcactgcaacctctgcctcccagattcaagtgatcctccagcctcagcctcctgagtagctgggattacaggcatgtgccaccacacccggctaatttttgtatttttggtagagatggggttttgccatgttggccaggctggtctcgaactcctgacctcaggtgatctgcccacctgtctcccaaaatgctgggattacaggtgtgaaccaccacacctggccttgatcagatttagatgcaagttttgaacatgaatatatggtggtacattctttcatcagaaggtaggtaattattgttgcttcccccatgttttttgagacaattgtttctgagacatctgtagccaaggctggagtacagtggccttggcttacagcagccttgacttcctgggttcaggtggttctctcacctcagcttctcaagcagctgagaccacaggtgtgcaccaccacgcccagctaatttttttgtatttttagtagagacagtatttcgccatgttgcccgggcttgtcttgaactcccggcctcaagtgatttgcctgccttggcctcccaaagtgctaggattacaggtgtgagccactgtgcctggcctcccgctttttttttttaacgttagcagctgttgatgatcattgcccagctccactaatgcattagggattacacaatggtaatatacttattttaacatgatttcttcatttgctggttgtaatacttctggcaagagaaacattcccctcacaattatttggttactctgaggaacggttcatacaggaaaggcagtattcatgattctttccctttattttccggttttcaaagcatcctccaaaggtgaccaatgctttccttttgaatgattgtttttgttgtttttttgcattcccaaaagaaatgctactgattatggttattattctttcagtaccttgttggattctatttcctagagttttatttaagtgtctcatgtatattaatagatgaaattgatttatatcttggggtgacttccagattttacacacacacacacacacacacacacacacacacacacagattgtgttcaaactatttcttattataatctctgtgggtactgaaagaatcatgcatttatggggatgaaaaaaattacctttgagagcaagcattcagtgtacccaataaagcagaaactcttgcataatcacaaataaaggtgccacagaaatttatgggaaatgcggtcttgcattgcccagaggaagtcaccagggacagatgtttagtagctcctcctgcacacatacagttccattttagggaaagaggttgctcttgctctgtctacagccttatgggggagactccacatctttgtccatccaaagtattggtcctaggaaccaaactgaaagtgccttgaaaaggacatttgcatagagattgggggtggaagggggagaatgtcaggtggaattgacttgtgctcctgtaaggtagaaacaacacactgaggaatcgtattaagtgctcccagactgtcctagacttggtctcaagggaatggcaggcaagagaaggccttggtttcctatctgctgggtccagggctggagagtgggcatttgcttccttctctggaacagggtgctggatgggaggccaggaatgtgcatcaaagtgcacaagagatgattctagaaactctgctcttgccaagtatagcctggccagcatgcagcctggtactctaagaggtaagttccttgagagcaactaggaagagcattaatattttgtgctgatttggaagaggcaaggagagtgcaaactgatgtaacgaaggtcagaaatgtagatgccagagacctgtgtgcaagtcagggtctctatgggatctgggcttctctataactccagtaattttttttgagatggagtctcgctctgttgcccaggctggagtgcaatggcatgacatcggctcactgcaacctccacctcccaggttcaagtgattctcctgtctcagcctcctgagtagctgggattacaggcatgcgccatcatgcctggctaatttttgtatttttagtagagacggggtttcaccatgttggccaggctggtctcgaactcctgacctaggtgatccgcccgcttcagtctcccaaagtgctgggattacaagagtgagccaccgcgcctggcctaactccagtaattttaaggaatatctatcagccttgttttcctcatctttaagatgagcatggaaagagaacttatcttgtaggcctgttttggagattaaatgtgatatggcatgcatacctttgcttgcacataacaagatcctaataaaagccattgcttctattatgcaagatactttgctaggttcttttaattaagtgtaccaatgaacatgtttattgtgaggttagtactgatatcttattattttatgtcatctttattttaataagaaaatggatgctcagagaagtgaagccagtcatccaacattaacaggtaggtggcggaagtgctggggttttaaatcccagaactgctttccatcccgtgttgtgcttcgccaatacgccatattgccaaaaacccagacttggatgttaactgtctttgaattcttcacagcactcagccccatgaaatgatcttaatgactccacaagaaataaatgctgaagaaaaatggactccagcctcctaggcccaggatttcttgatgtttctttggtgtttgggaggacactgtatttctgcagcttcaggatggcttatgtactctctggcctgtatttgttcctagcacccctggtttgagtttaccagaagccagtgtgagattcaggggccaatgtgtactatcagcgacaaatattggttatcaggtgagaggtcctgtctaaagtgaagctgtgcttggagctcagatactgactccatgtgaatgcaatggatcttgtgtgttaggaggacaagactcctggaatagaaattcagtgagacctcacaccagagctctaggcaggggtggaaaagccccaggcaaggagctgggctataaacaattcttgatccttctgttcagagtgtgcaaaatttgcatggtgttaccccatgcagagacaacttgggttgtgtgccaatggacgtttcagggcacttctcaaaggagggagctaagctgaggggcttggcagggggcagactccacaataaaaggcttattggatgtctgtgagggtacactcaagacaggagagagtcagcaggcccagctgagaaaattcaatctcaaccttctctaaagacattctctgaagacacatgctttattttccactcattctttcctgatctgagctggccctacactcatattatatccatcattgtctttggcttctaaggatgtgctgattgccctatagattgacatacaaagttcagaacgataaaaatggaaaggcattatagtattatctaaatatgcctcctcaatttaaagattaataaaactgggctagactaggtcacacagttggttagaggcaatgtcaagattagaagttgccccattctcagtgtgctgttcatcattccaaataaaatcaaaataagatatctttaaaggtttctcactagaaatgatgatgaagagagcaccatcaataaaagagacagacgtgcctgaaagctccttccctgccctgccctttccagtttcctgtggattctcaagaccatgaaaggttagaaatattagctgcagagagaaaagaaacataacatgaacatattttcctatcagtggattttcccctacaagatcatttttgaagaagctaatggttaggagcacggcctctggggccagacttcctagactcaaatcctggctccatgtcttactaggtatatgaccttgggcaaattaacctctgtgctttggtctacccatctgtaaaacagggataacagtatctacttcataggttgttatgaggattaaataaccgtttcgtcttatctatatccatctatctctacatagatatatatatgtatatatatcctagaatagtgcttggcatgtagtaaactctgctatagcagagttttctattatcgacaaatagcaagatattctgccctttggatgtgtgataatttctttagccaatcccttactattgtatatttgatggccttcagctttttgttgttattcaaaggaggataaattatcactaaatccatcggaaataaatgtctacactctccaaataatccatgtgagagttacaatggacaggtaggtgccatttccttcctgtttttttctggtagcaaagtaggacaggaaatgtagagtctagttgggtggccatatgccctgccagaattcactggggagttctactattaaaggaagaagggaaccatggctactgcagggctatcagcagaccctgccacagcttttaacatccatcctatcccctagactacaactctgtggaagtttggttaaacaaggtaatcacaggactacccttatgttgtcacactttagtggataaatgtttaaaaaaacctggatctatttttatcatcccttaaatttcaaactccctttgtcacctggttttaggtacatttttttacaagccatacatagttggatttagttttctaactcactgttaaactacctctgtctttgatgtaggaattcaatttgttcatattatttgtgataacatttattgattctttttcatttttacttgtttaaagtctattgtacttttcttttccactttccttactttttctatcttggtcagtgttcactttatcatttaaaaaaatttaggagaaattctactaggaaacaaatggaaaaagacaatcaagaaaatcaagggtaggcctaaatgactactggtatggatacttgtaaaaagtcattaaagagacttgaactacagaaaaacagataaatgtaaaaaaaacttagctgcaattcttactacaaaacatcacctttgttaatgttctaatgcattaagacttttctggaaaatcagatattctattaacagatattcatatggatataaatatgcatatacattatataaataaaaataacccatttaagaaccatgaaggctctcttttctctccctgaatgtaagtccctccttcctcctaaaatgtaactgatattgtagattttgtgttaatcattgatttgctttcttttctaaatttactacttacatatgtatccctgaacaatgtattcttggtttgcttttgaactttatataaataacataacagagtatctatatttttcccttttttaaattcaacatcactttaagatataaccatgttgatgtgtttaacagagttttattcattttcattgatgtatattatttctaccatatgactatgccaacatttattaatttagtttattggtaatcaacatttggatattttctttaaattttttttttacaaaaactattgcaatgttgcagtgaacattcttgtacaaatttgtgggtgcagatgtgcaagagtttctgtaaggcaatttttttgtgtggtgaaactactggtattctggataagactatttcctgtcctttcactgatacattgtagggaaattagcatctctggcctcccatctacccagagcctgtagcatgtcaatgatgtgacaatcaaaacaacagatttccaaacacactttaggaagtccagttgagaattattgttttatggtatgtatctagaattggaattgatggaccacaggttatgtgaccgttcaattttcacttataaaatatattgtattgttgtgttcccatgtgtaaatccaacatacacataatttatgttatacagcacactcgtatcctatgtaactatatatagcccaatatacttcaggaaatcttcacacatattcaacgctatcgtgtcaatgacttaaataattcatagttttacaaaaggatcatgtttcacattctattaagaacaagtcattttctaatcttttctttaattactctgctattacatctgaaagatgacttctacctaaacattttatgcacaagaacattttgcattcatataccttaaaattaatttttcctccacagctctgaatacttgctgaaagctttcacatgttcaaagcattcatgtggtttcactcctatgttaattttctaattcctattcgttataacctacaaacaaatactttcctacatgtattaataccttagtgtttctgccctatgattttgctgatgtttgacaaatttgccttgaagatgcaggtttctgcacatggagggtgttgataatagttttcttcttgtgtgttttcctttgatgtttggtgagggctgacctctggctgaaggtttttctacattcattacattcatagggtttttcccctgtgtgaattcgctcatgttttgtgagggctgacttttcatagaaggttttcccacactcaggacatctgtaggatttttctcctgagttctctgatgcacgacaaggttggatttcacatagaaagatctccagcactcattacatttatagggtttctcaccgtgtgtgagtccttcaatgttgagtaaggtttgatttcacacagaaggttttctcacattcattgcatttatatagtttctctcccatgtgagttctccgatgtactgtgagggctgatttctggcagaaggactttccacgttcattacattcatatggtttttctcctgtgtgagttctctgatgttcagcgtagttggacttcacaaagaaggatttttcacattcattacattcatagggttttcttccgtgtgtgtgtgctctgatgctatctgagatctgttttcttacagaagctttctccacatttattgcagtcataggttttctctttttttgtgagctctctggctttgtgtaagttgtgacttcctacttgaggcaccccactttcattacgcccattattttttttccccaagtgccttctctgatgttgagtgtgtttcaacttctcaaagaaaggtttctcacatttattacctttacagtttttctctcttgttttaatcttgttttaattctctgattgggagtgaggcaagattccttcaagactctttcactatcattacacttgctgggttttcctgttgtgtgggttctctgatgttgagtaaggcatgctttttcatgaaagaatttcccacatttcttacaatcatagactttctctcctgcatgagttctctcattttgagtatggtataacttcttcaaggctttctcattttctttacactcatcaggtttttctcctgtgtacattctttgatgttgggtaaagtttgatttcttgctaaattttccaaattcattacattcatagtgtttctctccttcatagtgttgcccgggcaacactgcgagactccgtctcaaaaaaaaaatactgacaatacttgtatagtagttactatataacaggacttgttctaagtactttgtatgtcttccttcatttaacctttaaaataaagccaagcatagctactattatgacttccatttcatagaataggaaagcgaggggaagactgagcaatgtggtggagctgggctttgaacccgggcaatccggccccagatccattcacttgagcactgtgttaatatttttcacttttaaaatgaggcacaattacataaccgctgaaaagcttccccgtactcctataaagtcaagagtaggtagtgggtagcatgtccctaaattccagatgtggagatgggtggggtttgagggctctgcagaaatctaggaagaggggttgaagaattaggggcatgggaggagtttccgagaggagtggtgatagtatcttccccgtcatgcgcaccaggtactcacctgggagttcctcctcccccgcagccggcctcctgcccaccatcctcagtccagctcgccatcctcagcccagctcacctctgtcctgtgacagctggcccacaccttcgttgaccgacggttcttggcaacctccgacatgatgagttattcagggcggaagaatcgggaattgcttcaagagcaagcgcttacagacttgcctgttttcccagacgtccttggtgcagctgtgtgcgttttatcagagggtgggaacctcccaggcgagattcctgcttctggcgtcccctcctcacaggagcagggtgaccctggctggggagagagggaataaattcagataactgggaccttcagccggttccaactctctcttggagttcactatctcctacaacagaggctttcagtgtggaccctggactggcagcatcagcatcacctgggaactaaatagaaaggcaaatccttggggctctccccagacctactgaatcagaaacgctgggtgtggggcccagtcgtggggtggggtttaacaggcccttcaggtgatacggatgcatgcgagtttgaaaaccactgcctgcaaatctcccttgggaacctgagaactgtggagggcacaaacagatggaccttgagtttcccagaggcctcagttacacagtacccccagggttctgcagagataccaagaaatctccaagatccttaagggaaggctcagtccttacacactccggttggcccatagagacatgccactctgctaagtgctgtgaagcatgcgatttggaaataaaactgaggcttgcatcccagatccttcacttgctagccatgtgacttcacctccagagtcttggttttcttctcagttaaaatagggtgggtaacaccgactttacagggggtctttgagaatcaaatgacacaccgagtgaaaagaacagtgggaaaggcaggccgcatttccagagtgcttagaaaatgtcaggacctgtgcggagtgctttagaggtgctctcttattcaacactcagaacgaccctgaagcaggttttagaaataacttcattttacagatggggaaattgagtcttagagtttaggttcatcactgtgttcatggagagccagtgacagacctaggatgtgaactcgtcttactttcaaactcaggctctgcatctgcaataaggcttgctaaggtaggaatgatagtacagcataaagtaaactttgtaagaattgttctcatccccgctggagtagtgggtttgaccagctgatgaatggttgcccagggcacctgcgagttagaggagcttctggaaacagctcttttaacatgtgaatgccttttcccggagccctttattctgatcaggaaacctgttccctccgcccttatcttcttcgtggcacctgcagatccgcagcggacctcctcctccgtcacttgctttctagacggacagatgcagggcagactcgggaacaagtgccagagggtctcaacccgcgtgggatttgcgcaagtttttgcttccacaggctgtgaacacaaacctaccccaagccccgcaaagcaaccctccaagctaggctctcacctgcggagcgcatcgttagtgcagcacctggtcgctgagttacgcgtagacgcggaggctccacgctgatcagagacaggagtaaggaacaaggaggaagtctgcacatgcgcagacggggctgccaaagaccggttcccggggccctgccggggcgatccatcaacttccagactccgtttcccacaagtctccgcgcccccttccttaaggaacgtctgaagagtttctggcttacttggcaagttgggggatttgtggtccaaagtcatctttacttttatttggagccctagttcctcataacccaccaggtaggagatttgcatgcactccacttacaatcagtgtcacttcagaggcaaagctaccgtgagaaggaaaggagtttgtcaactgcacatctgaaaacaaaattaatgaaagccaagcaacatagtggaatatttatagaaaataaagcaaagcaataagtaaaagattaataaccacgaccagaaagctttttccgcagaatgcaaatattacctccacctgaaactggatttcaaaagtaaaagcctcacataatggcaaatacacataaatcaaaggaaaatttcatctaagaagcacactcagaatctccccttccagagatgaccatggccaatgttagatgatattgaaatgggaccccaaaatctcaatgagtgatttgggtcttttcattgaacatgttgttaataattttcttacccttttacactttttattttgaaatattttaaacttacagaaaagtttcagggatgattcattcggatcatctgtaaaccatttactcagattcatcaacagcaaatatctgcctccccaccttctgtttctctcctcatcctcatcaccatttgagggtaagttacaaatatgaactgtcacccctaaaactttagcatatatcacctagaacaagggctttttaaaaacataaccacaattatcaaaaatttttaaacataactacaattatcaaaattgtttaaacataaccacaattatcaaatccaagaacttaaacagatataatattattatctaaaatctagaccatattcaaattttactaattgttctaataatatcctttataattttttttctgatccggggttcaattgaggatcatttttacgcagagttgccatatcatttagaccactttaatctagttccttggcctttctctgtctttcaagacattgttaattttgaagaggacgcatcagtttttttgaagaatgttcctttatttgggtttgtctgagtgtttcctgataatttgattcaggttatacatttcttggcaggaatcctatataaggaatattgtgttcttcttggtatatcatgctaggtcagtgggatgatgtcagtttatcccatttttggtaaaaaaaaaatttcgcacaagtctcctttattaatctacccttttggtaacaattccttgatcacaaatctagcacaggtagccaaaagatataaagtaccacagactttgtattgactcaagttggatgatgacttttacactaaaattaacacatactgaagagataaaaagttctcaaagtttacacacgtataggaatacaaactgaatacagtttttaaataaaagatgattacttttcaaattatttaaagggaagcctactttcaaacaccctaggaacaagccactcaacactacgtaaactcagaagagctctgaaagagtatttttccaccagcaaaccaaaacacacaccaattggcagtagacagaggcaggtcttctgactaagaaatggatattatacaaatgtatatttacagcataattttacttcatgtgaataactgctaaagcatgacaccaggccgggtgctgtggctcacgcctgtaatcccagcactttgggaggtcgaggcgggctgatcacgaggtcaggagattgagaccatcccggctaacacggagaaaccccgtctctactaaaaatacaaaaaattagctgggcttggtggcaggtgcctgtagtccccactactggggaggctgaggcaggagaatggcatgaacccaggaggcggatcttgcagtgagccgagatcacgccactgcactctagcctgggccacagagctagactccgtctcaaaaaaaaaaaagcatgacaccatatgaagtaatggtaaataattaaaagcttatttaatgaataacataataaattgaaactaagaaatgcaaaactaaaatggtaatagaaaaataaagaatttaataaaacactgttagaagaattacaaaatactcttctgaatacctgctatgaaattatctatacccatgaagaataggcattttccaatattaaattggtgcattgtggtcatactccataaagatactgaaaagcatcatccgtaaaaattttttttgttttacctgggaaatgtacttcttacaaaagggcggctgcaaaatacagagactttggcaactgttagtccaaactgcaccattttgtaagccccgtgccatttcgcagaccttggtcaaagtgaaacactccacgggggttcgggtcatgagaaatattcctatcataccctgccgggcaagggcccaactgaagagacatccctatcataccctgctgaacaaaggtccaaggaacatcttatcacatcccactggaaaaagggccaaactgcttgaccacaggtacatcttatcaatatcctgccaggcagtaagccagatggcccagacccctcctgcccatacctataagtaccccagcctgtaagtggtggtagactctggctttaagctgatcccccaactctgcaggtttttgcaatatgcctgtgttgctgttgagccccactctctctgtgtgtctttctttaaccctcaccttcccttcaaaaccaaacagcaacaattacttgtttttttcttaaagttaaagaatgagtgggatccaaggaacaaaatggtagaccaggagcaggtccaagttattttcaggaaacagagcaacaaagcacaaaggcaaaatttccaatagaaattcttttaataacttagcttgtctctgggattaccgtctcctcccctttagcagaaaagtgtgacttattactgtaggccaattactccactacagtaaacaccttagaatgtagttttgaatcacatctgtctacctgaaagatcagaagtggaattacgcaaatacccacaaaaacaaacacaaaaaactcaacaacaaaacacctcgaatggtgacaaaggtttttcaaaaagtgcctggactagaaagcctagattgtaaacagtaaatacaattctgtatccaagccccagtttgtgttaatatgtaggataaccagatagttttaactctatggctaaccccatttctttctttatatagacaggcagagctagcactgctatattaacaactaccaatatactgctttgtcctttaaaatctatctgccacagaaggcttaaaccactaaaccaagtttctctactaaggctaagaatactgcatctatgcagggatgagaggcttatcacatactcacactcacacacaccaagctcttgggagtcaacttgcaactctgcattgattttatgcccctctatcttttatttacattctttctcaattttcctatcattcaaaacatggtagggccgggcacggtggctcacgcttgtaatcccagcactttgggaggtcaaggtgggaggatcagctgaggtcaggagttcaagaccagcctggccaacatggcgaaaccctgt[133 bp omitted]tactccagccagggagcctgggtggcagagtgagactccatctaaaataaacaaacaacaaacaaaacacacagtagaaatctcaacacattcacaactggttctggttacccagtagtattacttgtgtacaattaagcaagagaccaaaaccacagagcaagttggacagggtgggaattacagggtagggaacagatataaaaacacagatgtgcagatttcagcagaaacgtcaaggatccacatcctgtgttggagcagaaggctctttagaagcgcatatcccttcacccatcactcctatccttggaccccaaagcagggccgcagcttttactttcaaacccagggtcctcaaaatgagcgtgcaaagtccataaacacaatctggttgaaaacagatgacacaacacacctacacgaactgtctgactgttaaattcatgttacaaaacactaacttcaggatttatttttgaaacttttttccacagagaaaataacacactccttggggaaaggtcacagattgagaagacaggccctaggtaaaaattattaagacagcacctggagttgataggcctgcctaggagagaaacatgggcactgtcacaccaccacaggggactgctgctgtctgaggtcagcaggccagttcacatgccacgcaaggtggctactgagccaagtcataaaaatcttccagatcatcatggaacaagtcccactcattttcaaagtctgtcagttcatcgtccccatctgccaaaagcataagcaacatctcacccagctcaaaggtgacaacctcttcttcattgttgtcaaaggggtcattgttctctctttcctcaatgagctccgagaagtggttccttcactgggcccagtatctgtttgcctgtctctgtgtatcctttctatggccatcagggaatacctgcttgtaaaaacacatcccccaagatgggcagctcccctgtccttcatcaaaatccctgcacgcctggctgctcattgcctccttgactttctggatgagtttctgcttctcttctttctcccgcctggtactcactgggaatgacaaagttagatgtgatccggcattctgggtaggacactatgatcttgctctcaaatagcttagtgcccttccacttgtgaatatacttgagacagtaggcgtggctgcagctggagaggatcccaaagccacgctcactggggctggctttctcacagaccacctccatgcagatcccacacatcgtatccttgctgcactgcacagcaaatgagagctccgtttccttctcatgggcctcaggacaagatttttatatgctgtggtctctgggcagcatccattggaggtaggacctgcagcttacatgatcacatgactctctgtggagatacacacagttctacccatttccatctctcccactgcagcctaggggcaaagcagcttgttatcacagctgtttgctctttctctgattctcccttggtcactgcagaaaggggcagtgtacgctgcagtagagttgcccaggaacaaactcaacagcatctacccagtcctctgaacccactcctacagttgcaaagtttgagtctgactcagcttcgcctgtattcatttccacaagcggtccaactatgaatgagagacttaaggaagcagcaagggatgattttgtagttagatctgtagcagttgcttgttcgtttcagtggcttgctgtgttcacatctgcagcggcctccataaacacagtaccgtcgctgaaaatacttgcccactacgccatgtggactgtcagagagggaatgcaagtagcgacagttatgtccttccttacaaatcccatgcacaaaataccagcaggtgacctgtttagttcagctgttgctgcagctactgccactccttcttcccgtccccagggatgggggtggtgactgtgggatggggtgggatagctgctgctgcaggtcctgctcctgatattgtggctgttgttctgggagctgcagcctccactgttactgtttatcccacatacccatttttggtaaaattaactgatcccatggttaagatgatatgtaggccaatatacttttatatcaattgtttcttttctgccgatgatgatatgataataataactttaaaacagtaagctccagccagcacggtggctcaggcctgtaatcccagtgctttgggaagccaaggcagcaggatcacttgagaccaggagtttgagaccatcctgggcaacataatataaccccatctctaaaaaaccaaaacaaacaaacaaacaaaaaacactagaaaaaattagctgggcatggtggtgcacacctgtagtcccagctacttgggaagctgaggtaggaggatcacgtgagtctgagtggtcaaggctgtagtgagctatgatcgtgccactgcactccagcctgtcccagcactttgggaggctgaggtgggtggatcatgaggtcaggagattgagaacatcctggctaacacggtgaaaccccgtctccactaaaatacaaaagaaattagccgggcgtggtggcgagcgcctgtagtcccagctactcaggaacctgaggcgggagaatggcatgtatccaggaggtggagcttgcagtgagccaagatcgtgccacttactccagcctgagcgacagagcgaaactccgtctaaaaaaaaaaaaattagaatatgaaaaagatggaatttctggggaagagggggaattcatgttaggaaactagaggtgttgatgggagagaggaagattatccgtctagcacatataccctataaatttcatgtagacttttggctcaacatttttaacagtaaaccaataggaatatagagataatataaaaaaattttcttatctaatctctaggtaagaataccaagccatcaaaggcagtggccacaaaagaaatgactgccaaattttactctaaacaaatttaaaatcttgcttttagataaaaacaagtaaaaacacacttagaaaatacatttgttaagtatatgaaacggtttgttgacttcatttaattatctcttacacatttataagaagattacactaccataaaaatgatctatgaatatgaagggtaggtaataaaagggaaatgcaaatgaagaataaatatgtgaaaacagcccataaattacaaattaaaaatgcaaatgtttatttatttatttatttattttattttttgagacagagtctcgctccgttgcccagacttgagtgcagttgctccatctaagctcattacaacctctgcctcctgggttcatgcaattctcctgcctcagcctcccgagtagctgagattacaggtacgcaccatcgcacctggctaatttttgtatttttagtagaaacggggttttgccattttggccaagctggtcttgaactcctgacttcaggtgatctgtccacctcagcctcccaaagtgctgggattacaggcatgagccactacaactggccaaaaatgtaaatgtttaaatacactttttggcctttatataaagttggcagattataaagaaaaatgatatctaggatgggtatcagtttgggaaaatgttaattctcataacttttttgaatataatttctaaaacaaatcatgtttgttggaggccactccacaccaagatttaaaatgagcatgcactttaatagactaattctatttctattaatgtgacctaaggaaatagttgtccaaaatatgtgtgtaggtatatttctcacagttcatgttaacagcaatacactgtaaaaaatctaaatgtgaaaaaaggataaaataacttgtaggaatctataaggtgagatgttaggtacccattaaaaattataatgcaggtgtcttcctgctggcaagaatataaaagaaaaaatatacaatgtagggatattctaaatgatatggctggagtttacaatatttttaaataaaatgcactttccacacaaaaataaggcattttttgggaaaaataacgcatatttcctaagggtttaaaatatatgtaaataccaaatacagggaaaaaaattgaaccaaaagaaaaattaaaaatctgcttcaccctcacacgtaacaatagtacagtctatgccaggattttgtttacaaaaggcctaggaaaattcaaaacctgtgtcattcaacactaatatccccctaggagtagacatggaatggagaggaggcattctcaggggcatagatttacatcctttgtggaatatatgtacgctaatgctgcctttttaattttctcagctttagctctgatgttgtattgagtcttctccactaaattaactgcacagtgcattgtggtgtttgtctaagcgtttttgtagtatcttataacatctaatttccacttcaaagtaattgatcttcatgaatttttttaaaaccctctaaaagctctactatttaatgaatatttggatgagactggtgtagtaattaaaatacttaacattttaataaaagcaaatgttagcgatccacgttacataatcatttagaatattctaaagcattagtaacaatgtgttcatcacaggacactagtagtcatggatttgattgttaaatgggtctattttagtttttaatgctaaagtgatatggccaagtgttactgacataaccaaagaacaattagtgttctttactgcttataagtgatatgactcctcacaaattttggaaactttgggagatctgtatgatattgaaatttgtacctaatattgatgtagggcaggcaagcccccagattagggcttagcctgggacagtttttggtgacctggtggtgttggacagtaacttttactgaggcggcggtgcacgacagcagcagaaatactgcttgtagagtggggctccccgataggtggtgtgtccagagtagcagctcagggacacttccgcagttgtgtttacacccacattttttttttttttgagacggagtctcgctctgtcgcccaggctggagtgcaatggtgcaacctcggctcactgcaacctcaacccccaggttcaagtgattctcccacctcagcctcctgagtagctgagattacaggcacccgccatcatgactggctaatttttttttttttttggtatttttgtagagacagggtttcaccatgttgaccaggctggtcttgaactcctgacctcaggtgattcacccgcctcagcctccgtaagtgttgggattacgggcgtgagctacacccccgggcctatacccacttttaaatatatgcaaattaacaggcagattatgcagagatatttagaaaaagggtggtaatctccaggttgtcaggctgttgccatggaaagaggctgtaacttccagtgttgccatggcaacggtaaactgacatggcactcacgggtgggcatgtcttatggagaggggcttttgcttcttccctgttttagctagtctttaacatggtctgcagtctgacctgcctctggagtcgaatctcacctcctacctcaatatgagacataattactaatatgatcattctttggtatcatttcaaatttgtataattgaaattcctgtactataggtggcactgtactaggtattttctatagtttcatttgaaatgtatagatgtaaatacttggaaagaaagtcaagaacaatacacgctgacctgatgacagtactgatttctctagagaagatcaacttaaatgggacttattgctaatattttactttttttatcaacaaaaacatgtactcattttatttgatatataattaaaaactgaccatgtgaaaataatggtatcagtagacaacactatacctgtaataagaaaaacccagaatcataattgaaaactatcccccaaactgggagggagccaagagaccaaaaagtgagttaggcaagtccagtttggcaagtagatgagtttattaggacttacatatgaggcactcccggacggtagcaggacacctttagagatccaccccgcctcccagccctatgctccttttttttttttttttgagacggagtctcgctctgtcgcccaggctggagtgcggtggagtgatcttggctcactgcaagctccgcctcccaggttcacgccattctcctgcctcagcctcctgagtagctgagactacaggtgcccaccaccacactgggctattttttttttgtattttttagtagagacggggtttcaccatgttagccaggatggtctcgatctcctgacctcgtgatccgcccacttcagcctcccaaagtgctgggattacagacgtgtgccactgcgcctggcccctaagctacttttaagcaaattttctggctctttgccgactgtgtgtgcaatgagactgttttcttgtagattcttagataccctctgggatgcttgggttcacagggacacctgctccttggctgggcaccatgaccttggctcattggctcgccttcagggttcaggcagcagacatacacccttaagcaaactgatgggggacccatcacactacagtaccacacttgcttaaccatattatgaatgggttggagaattctaagctgtcttttcccttggctggtgacttctcatatctcatactcacaattgctacccttaaaatagggacaagattcatcccactcaggcttttgtatttaaaatagtagagctcccagagctcctaggacaatacccacctaataaaaaataggtgctccataaaagacagttaattttaacttctctcattttacagagaaagaaactagggccaaagagggacagtgagtttttcaaggccctacaataatttttatgagctgaggctgaagcctaggtcccctggctggctgccaattccctcccactaggagatctcccaccaccccttattggctccatctttcctcctcctactttgccttccacccaaatggcccttcaagtgaagcaagcactgattccaggtcttggttgtctccttcctttgtgtgctccattgaggtgaccaaattgctagtgatttcagctgaaggaaactaccctgagatgtgaggctttctgtgggagaggcaggagggatgccttatggccaatggagtctagaacacaatctcaaggtatactgcaggtgggaatcactgtagccattttatcagagaggaacgcgagggacagagtgggttgagacaggtccaaagataaacactatatttttatgctaattatattctatctcttctttacactttaaccacccaagcatgcattcataaacactccattttacgcatctgtaaacactctattttagctttgcctgttacttgaagtccagataaatggaaaaacactttataagttcccttgtgtctatgtttgtgacatttgttcatgctatcatgtttagcatgttatttttattactgtacaatatttcagtatatgagtacactgccatataattatccattctacttctaatggatgtttgaatttttccagtttatagacattatagtgctgctatgaacattcttgtacacaaattctggtgaacaaaagcatgaatttccataagatattacctaagactgtaattgctaagttatagggtacagatatcttcaattttagtagataatgctaaaatattttctttctggaaattgtaaaaatacactcttcaccaacaatgtgtgtgattccagttgttccacattcttgccaaaacttggtattgtcaatcattttagttttagccaatccttttaattttaggtggttgtgtggtactatgtcattttgggattcgatttctcataattactgatgaggctgagcaccttttctatacctattgtccattttgatattgggtgtgtgtgacgtgcctgttcaagtattttgcccatttttaaaattgggttgtctgctatcaattcaaaaaggttttgtgtatatacagtataagaatactgtgtcaggtatatttattaccaataccttcttccattctttggcttgcctctttcactcttttaatggtgtcttttgaggaacaggagttcttaattttaatgtagtcaaatttatcaatcttttcctttctggttaatgtggttttgtcctatttaagacaccttttcctacttcaaattcatgaaaatattgtcctattatatcacctaatgctttgttttacttttcacaattagagataaattcacatgggatttatttaagtatacggtgaaaggtagatttctttctttctcatataatttcccacatgactcaacaccatctattgaaaagatcattccttccccactgctctgcagtatggcttttttcataagctatataggtttatttctgggttctatattttgtttctttcctttaattatctgttcttatgccaacaccatacttaattactgtaattttaaaataagtcttaatatctggtagtataagtctcttaactttgttcttcaagattggctgggctattcttggccatttgcatttctaggtacattgtaatgttaacatcaatttccacaaaaaagcttgctaggattttgacagggattgcattgaatttatcaattaacttgtcaaatcttgacatctttacaatatttagttttctaattcatggacatagtaatcactacatttatttaggtcttcagttttcctaagccctccaagtgtccactcatgtctttccagcataatagccaaagtcctcactttgacttatgaggccctaaatgatctgtttcctgttaactcttttgactttctcccctgctactccaccccttgcggaatatagtccagctatggtggcctccttgctgttctagaccctgaggagacagcagtgaacatatgcaaaaagctctccccttataaagttccccattctaatgaggaaacagataataaaccatatcaataaataaaatacatagtaagttaaatggtgatgtgtagtagagaaaaacatatacagtagggagaagaaatatgaaatggcaggaggttaacattttagactgagtggccaaggaaggcctgagaagatagcttttaagtcgatattttaagaaagccagaaaaatagccatgtggattccaggaggaagggtctcccaggcagagaaatcacaaagtgtaaaaactctaggacggcctaaatagctccttgtgttcaaggattggtaagaaggctactgaagctgaaaaagaagagggataaagggttaacaggagaataggtcaggtaggtagggtctcataaggaagagtgaagatttaggcttttaatctgggtcatgtgggggccaccagaatacttgagagcagtgagtggctctgtcttaagggcagggattgccctgactgcacgggggcaagggtagaagcaggaatccagatgagagacgacggtggcttggaccagagttgtgtcagtgaaatcatgggaagaggtcaaattcttaatatatttggcaggtaatctgacaggatttgttgattactagatgtggatatattagaaacagagaagtcggggttgacacctcagccaaagcaactgatttaattcttttggtagttgtagacctattcatattttctatctctttctgcatcagttagtcaattttagtaccttttattttctaaaagtttatttatttggtccacttttattggcataaattgttcatccctctcttttataacattttaaatgtatgcatcatttgtaaatcttatttttatttgaaaagattcatttcttctgtttatcaggctaccctcgtattccaatattcattatttgtaccttttctgttctaagtaagtttcattagtgttaattttattagtctttttaataactgaattttgactttgttgcttccttgcattgtatggtttctatttcagattgctatttggtatttctttgtttatactttgttttgctgttccaacatcttgagataagtgcttcattattaattttttcttgtattcttttcagttgtatgcatgtaagatgataaacttctccttaagaactgctctaactataccttgatagacagttctttcttatgattcagttcaaactatccttttatttccttcagtttgataacaatcccattcaagatcatttattcttcatcccctcctgtcctcactttcccagatttcaatcatgcatttaaaaatggagaacatattatctaaatacagactcctagctgctaaggatttattcatcaatgaacaagatagacaaatcctgctccctcatggagtgtacattctagtgaggaagacaaaccagttacaaatgtacagggtggctataaagttgggaaacatgagtaaatatttactttatgtgagcatgttttataatcaattaatacctgcacttgacagggtaggggaaggtcacccaaagtgagattgtacgtgattgtatattgggattgtatgtgaccccattatgccagaatgcagagggactggtttgatgattaattttcaaagatggattgggtgatatggccacgtggaattggctgtgcactctccagatcttaagctcatcaattacttcttctgagggatgctaaatgcactggtgagtcttgtgaaaatcagagtcaaggccgggcgctgtggctcacgcctgtaatcccagcactttgggaggctgaggtgggtggatcacgaggtcaggaattcgagaccagcctggctgacatggcgaa[140 bp omitted]gccactgcattccagctggggcaacagagtgagaccgtatctcaaaaaaaaaaaaaaaatggaaatcagagtcaaagcacactgaaccacacattgctaactagggagaagaatttgaatatattgtaacatcagtaaacaattatatatatgtatatactcacctatatccagaatgtatggccaccatgtagaccgatgaggagtcaatagccagaataatcagatcatgctgatccaaatccacatctgtaggagtttaaagtcttatatagaggcctaccacctctgcaagatgccttgaagtctttttgctcaaattctccctttgcatgttggggctaaagcaaatctagaacaaagaattattgttaagactaagtgtaaagtatgtgaagtataaagagcaaaatgctaaacagacaaagtcttcaatagatacaataattgcataatgtattgctctttgggggcaaatcagggtgcaaataatttcaccaattggcataagcttctatcaccttggttaaattaggagctatgataacccccatcaataaatggtagtttagtgagagagacagagagaagagaagagggggtgaagggacagaaaggaacagaaacagaggcacagatagattatcaaagttgacaggagcttccagtatcatccagtacttattctcaccctgtgatttacatgccctaaggaaactgtgggtctattccaacaagtaaaggaaaccacaggatttacttggcatatctccttggaggataaattgtacttaatgtcacataataaaagccattactattctatgaaaaatataaatatggagtaaatcacaaaatcattcattttaaaaataaaaactaaccttttcagcaaatggtgctggagcaattgggcatccatagacataaaaaaccaaaccttgacttaaacctcaaattttatacaaaaacgaactcaaaatgaatcatggacataaatgtaaaactataaaacttttaggaaaaaataaaaatctttagactggaaacaaaaacatgatccataaaagaagatatttataaattagacctcatcaaaattaaaaacttttgctctgtgaaagacaagtgaagagaatgaaatgacaaactacaaagtgggagaacgtatttacaaactacacatttgacgaagggttggtatctaatatatacaaagacctctcgaaactcaacagcaaaaaaagaaaaaaaaatccaattagaaagtgggaaaaagacatgaaaggacatttcaatgacaaggatatacagatggaaaataagcacatgaaaagtgttcaacatcattagccagtaaggaaatgcaaattaaaaccacagtgtgatatcactacatgcctatcaaaatggctaaaataaaaaacagtaacaccactacatgctggccaggatgtggtgagactggatcactcatacattgctggtgggaatgtaaaatggtacaatcactctggaaaatagtttggcagtttcttatgtgcaattcctctacaacctggcaattttactaatgggcatttatcccagaaaataaaaacatatgttagcacaagaacctatacactaattttcatagtagcttcatttgtaatagccccaaacaggaagcagctcagatgccttttaaacaaatggcatacatccataccacggaatactattcagcaataacaagaagcaaattatcaatacatatagtgacttggatgaatctccagggaattatgttgatgataaaaaccaatcccagaagttatatactgcatgataatatttatataacattcttgaaacgataatattttagaaatggagaagagattagtagttacctgggacaggagagagactggggaggcagtgggtgtggttattgaagaagttaatgtgggtaacaccagagatcctggaggtgatgacagtgttctgtaacatgacaatggtggtgaatactagaacctacatgtgataaaactgtatagaattaacacacacatacaaatgaagtaaagctaaggaaatatgaataagatcggagaattttatcaacctcaatatcctggttttgatattgtactatcattttgcaagatgttaccattaggcaaaactgggtaaagggtatatgagggctctattttttcttgcaactgcatgtcaacctacaattatctcaatacaaatgtcaattatacaaaatagaagttagatttaatgtctttcttttttatatgtgcagtctcaggttatacctgcagaaccatatacttgtattatgctgctgacaaaaaagtgtgaaagaacccaatgccttcattttaaagatgagtcacataaaggttaggcgactatccaagctgataaagcttgtttatattaagcatttatcatggtttctgcctttccataagttataatgatggagaattttatggcaatgttaagacgtccagtcctgggttcagacaactttgggatatatcctatcaggattcaaacggtctcaccatgtgatcttagaaaaataatgtttgcattttctactcattgaaatgagataataaaataatcccatacaccgatgggatttcaagatactgaaataaaataattcatgctggtacagtggatgcgtgataggagactctcaaaataatgcctgttttccggcatattaagtgctggacactagagctaaaggctttgaatacaaagagataaaaggtacagcttctgcttccataaacagagtctaggagagagaataacacaaagataattgcacagattaaaatgtgaaaaataggagagtacagggaattggtggttgatgaggctggataagtaaatgcagcaggtgaggaaggcacctttttaggaatccacactttggctaggtttatgtcatcaaagagcctaacagcctgtttttttgttttttggtttttttttttcacgtgacaggatcttgctttattgcccaggctggagtgcagtgatgtgatcatagctcactgctgcctcaaatggtggggctcaagtgatcttctcacctcagcctcccaagtagcctggactataggcacatgccaccatacctggaattttaaaagtgtttgtagagacaaggtcttgctatgttgcccaggatggtctcagacttctggcctcaggaaatcctcctgcctcagccctgtaaagtgctaggattacaggtatgagccgccatggctggccgagagcctggtcttttagagttagatggatttgaggatggagctcagtgctatccctcaccagctgtgttactgtgggcaaaattgcttatttttctaatcctcccttttctcaaccccaaaataagaagattgcaatagaataattccctctagggtggctgtgtcagttaatgagatcatgaatatggacatgcttagcactcagtatcttcctgcagcttgctaaaatagccacagtgtatgcaaaaatgtaaatatctttcggtataactgggctacaaatgatggtagaaaacataatcataccactccaaggtcatttcacatcttcatgtttaaaacagactattctgaaatagtcatttgattgagaaattaaattatctgatttcaacattcacatgtgctctctggtacattctctcctctcaagcactctctctccctttcctctgattttgtctcagaattatagttgtcaatgaaaagagtcaaaccctgtaaaacatttgaagagatttattctgagccaaatatgagtgaccaatggcccacaacacagccttcaggagatcccaaacacatgtgcctaaggtggtcaggctacaacttggttttatacattttagggacacaaaagacattaatcagtacaaaaaagatgtacactggttcagtctggaaaggtgggacaactggaaggcaagggcttccaggtcataagcagattcaaatactttctgactggcaattggttgaaaggattaagttattacctaaagacttagaatcaatggaaaggaacgtctgggctaaggggttgtgaagaccaagtttttatcatgcaggcaaagtctccaggtagctggctttagagagaatacattataaattattcttatcagacttagagagtctgttctctcagtaatttcaaaagggaggagggtataatgaggcatgtccgaccccacttcccatcatggcctgaactagtttttcaggttaacttcggaatttactttgctgagaggagaggtccattgcagtggttggagggcttagaattttatttttggtttacatagtctttgtgcaggggaacacttaacaaaaaatgaaggagcaagggaatatgtgtcaggtctgggtgctggtggctgggccctgctggcttctgtaggggcatttcaccccgttgggtctttggtttaggcttcagtcctgctgcatcccctgctggggtcatttggtccccctggcctttggatgcaagtgagcatctgggcccactgtcctcctacaaggcctctggtccagatgtcctcaccctgtgctcacctcaccccatccctggccaccctcagtctctggccctctgtatcagttatttattgctgctggaacaaatgcctgcaaacttagtggctcaaaataaaaacttttcttagaggtctggaggttagaagtccaaagcaggtctcatggggctaaaatcaaggtgctggagagactgtgctctttctgaaggctctaggggggaacctgtctccttgccttttcttgcttctggaggctcctacctgtcttttattatctgattttcttgcctccctcttttaaggacccttttgattatatcagacccacccggataatccaggataattgtcccaactcaggattctgtaagccaaaacaaaaatcccaggccccccaacagactgaacagagccaagagaaacctgaaaaatgaaattcacaatcatcatgggaagggaggttggacacacctcgttataccctctcccttttggagttcagcacaactgaccagcattaacactaaaatagagatcacaagactgacaaaacagactctgtggcaataagagatcaaattccatcctgactctagtgtagcatcacatgacagatatcagaccctgaaggaaatcaaagtattttaccccaaaatacatttctctgacactttgaaatggccctgcaaagctgtcttgtgtggggaaaattctacatctgtagagaacctccattaatgcagcccagtctttctgggatctaggagagattaactaagagtctgacacctttaaggtatgaaaagacacatttaccatctattcccactgaagcctgctacctggaggcttcatctacataataagaaccttggcttccacaactctccccacccgcttaccttaaccaaagcatttctttctactgatttcaaatagtttaactctttcaaacaattgccaatcagataatttttgaatccatctatgacctgtaagctcccccactctttgagatgtctcacctttccaggccaaatcaatatattccttacatgtattgatctatgtctttgcctgtaacttgtctccctaaactatataaaaccaaactgtaatctgacctccttgggcaccctttctcaggaccccctgaggctcttcctggagccatggtcactcatattggcttagaataaactcctttaaatattttacagagtttgggttttttgttcacaattattaatcacacatttgccaagtaaggtcacatactcacaggttctgggggttaggatgtggacatgtttggggggcaattgttctgctttccataccctcctatcattcccaacccctttctgggacaagcagcacacactggattcccccatgtcactgatgggccatgggaaagtggagatgctactttacgccgtcccgctgctgaaagcgccaaactgcctctcctcctccatgcagctgcctcatgggggtgggaggcaccaggtgaggccccttatctcagagattgaagtggaaagagtggcacaaacctatctgggtgtgtgttatatgacatcattcctggggtacataggaggcatgaataaagagcactggggaattttcagcctaagccttgatgtgacaatcctgcattccccaatccttcctgttcccactataatcaggaccaaaagagctgaatcctgcaggtagtgagctgggcttgattaggaaatgagaaggttctgggtgtgatgatctaagttccatataggtaggctcagatgcatgctgggcttgctagctgtatcggagttgatctttctgagaaggtgagttcaagctctgtttcactgggtggcagggaaagttttgttcaaggcagaaatggaaagtagagtctcacactttgacacatagggagagaccccagtatccaaaatcccagctgctgcagcatacccgtgggctctcttgagggcccaggaggagaaagaacctgaaagccaaggttggtacgctgttatggattcctggtttcctctgtgtgtgtggttgggggtaggggttggagtacctgttctcacatgcttctgtcctcaattttaaggtgtggcttctcaggagtctgtgttccctgagaacaggaggtgaagaatgaaaaggaaaatggctcggtcatttctagaggtgatatcacaggtgaactgcttacttctgatttccttcctaaaataccaatttacagggctaaagacattttgcatttgttccacaaggatgcagctccccattctggtgatgaggtgacagtcagagaggcaacagaggggacctaaataacccagaagctttctttagtgacccaagatttagtattcattcaacaaactgctcaaggtctgacccaagatttagtattcattcaacaaactgctcaacgactgacccaagatttaggattcattcaacaaactactcaaggactgactgaccaagaggagtcattagcacaggtcttctaggcatgaatttgtttgaaaacttttaagctgaagaataggagtccctggggatagtgagttcagtttgaagttggacagcttgcatgtgttggcagcgcagggagcaatggcttaacttgctctcaaatctatgggagagctggagcagggcacaggcagtcaggtggatgggatgaaggtggagggatgccaccatatttctgggtaacaaaagggcactcgtcctgacagacttaaaatccaacacatcaaactatgctaattaaaataatatagaaatgataatacgttgatgggtaaacagaagaaaatagaaggccagatacacattgtggtagaatgaacaatctcccccacccattgcaaaatgtccccatcctagtccctggaagctgtgaatgtgttaccttacatggtaaaagggactttgcaggtgtcattaagttgaggatcttcagatggggggtttctcctgggttgtctgggtgggcctgaaatgtaatcactgggtctctgtaagaaacaggcagggggatgctatgttgttggctttgaagacaggatagggctggccacgagccaaggaatgcaggtggtttctagaaaagttgaggaatcagattcttcctagagcctgcagcagggacacagcactgctaacccatattgtacttctgaactccacaactgtaagattataaatttgtgttgttttaagccatgaagttggtggtaatttgttatggcagcagtaagaaacattagcctctcactaatccacatatttagggcccaatgtttagaagaactgagtaaatgatggagatcacgtttccattagaggacaggctgatttaattgtggcatcaaataacaatgtccaaatataatagctagaattccattgaatcataaacgaatttaccaaaacatcttttaaaatgaagtctgtgaagacattttcatccctcaatcaggcagacctgagttaaattttacttctgtaatttttaatttttcaaattatataagaaatctatcaatgtatgatctttttaacaatgcagatgaataattttttaaagacctttttaatcattaaccctactcaaccactgtctttagttttttacacaatagatctttttttatatcaataaaatatcaattaaaaaagatctattgtgtatagatatgtaaagtaacatctccactttcccatggcccatcaatgacacaggggaatatgtctatattctgtaaatttttaagttttgtaatttattttggagatgtttccgtagcagcacgcatagatggcccttattctcaacatctgcaacgtgttctacagtgtgaattgtcctgtttttggacctttctcctgtttatagatctctatgtttgcagtatttcagtggtagacacaatgttgccatgaagtctctacatattcttaaactttaagaaagctatctagacttagaatttctgagtcaagggcatgcacctttaaccatgtgagatactgtcaagtcatgcttcaaaagtactatgctgactttgaagtccacaaatcagtgtgattgatggcttggttacatcccttaaaaacactggatagtatccaggttttaaatgttgtgactgtctcgccaaaacaagcaagacttgctgctaatataatgcgcatttaattgagaagagtttgtccacttattgatcatttgtatgctttcttcagtgaacttttcattcatatactttaggcatttgtctagtctgcagcttctatttttttttcttattgatctgtataaattctgaatgagttccttgttggttatacaacatactaatttaagttttttctgtgtcccttttattttttcacagagatttttctcctttataaggtcgattttattattttcttttatctggcacttgagtctttaagacatttttctattgtaagtctgaaaatcctcattttctaacattttaatagttttaataattatcttttatttcatctggaacatagtctcatagtcagggagggatcttgctctccccctactaagggatattcagttattgcctcagtattcattgaattgtttcccaacagacttgcaggtcatcttttttaggcagtaaacattcccatatttgcatctgtttctgggctctctttctttgatctcttcatctgtgctgatgacattcctaacccacttgaattactacaacttgactctgcaccctggcaagaacaagaccttcattaacttttcatgtaaaaaactagtctgtcacatttttcccttgtgtgaaaatcatgtatctgtttatcacagtttataaaataatcttaatggattttttaaatggagatactattgaatttatgtatatacttgggagacctgacatggttctagtattacttgcaaagaacttttgactgttcatattgagagactctgtcaaatctttagttttgactgatttataatactggtccaaaacccagtaggttcaagactcaagaagagctgatgctccagtttcagtctgaatcagcaaaaaaccgatgtcccatcccatgcagtcaggcaggacgaattcccttatcattctgcttgggtgggattctgacttagaggtatttggtcataatcccacagatggtagctctaccccactgactcagccaagcatgaacaccaaatgtatgtttccttagctgttactttatcataagtaattttgtcttcctaaactctacaagagtaaatcatacttttattgtctgcactttctattatagcttttggtcacatattctaatgtatccttatatcctgtgtgattccctagaatgcccaatttgaaagatatctaccagaggccacgtggaggcatgtatacatataaagtataaattgttatttcaggagttggtgagatttagagatgtggccgtggtcttctcaccagaagagtgggatcatctgactcctgaacagagaaacctgtataaagatgtgatgctggataactgtaaataccttgcgtctttgggtaaggaaggtcttgttagttcacaactgcccatgggagaattttctccttctgtgcaaatatctgcaacactccctgaaaatgccagttgaattttctaacttcatattcttcagtaaagcatcgtagctctgtgttaagagaagacattttcatcttgggatgatacaagcttcctattccccactgtcctcaaaatcatcacaccattctccaaaactatagtctgaggctgtcatatgcctaagaaacagctggggaatggtttaaaatgaagatggttttttatacaaaaacactgctttagaggttctgggaagattgagatgttaatgagattcctcatcactaaaaatgtgggtctaaattctgtaataaccacagcatggtcaagatcatttatttttcttaggaaactggacttataaggcacacgtgatgtcctctttgaagcaagggaaggagccctggatgatggagagagaggtgacaggtgatccctgcccaggtaacaagcagatggaagtcatcacagctcacacctcaactcagagtaacctggacactccccctccaacccccaccaggaggtgacaggagaagagctttcccctgggcttctgtccatgagtttccaaaggaatctttaccccacgtttatcactctccctgtaccctttttgttataattctagtcttaggacagtaaacggtgtgctgggaaaagtttggaatttaagttactacccaaatggataaaaggatgaatagctgaataggtcaaaaaacttgtcagtgattacaatgaatgaatgggttagctcggaaaagtgtcacagaaggttttttttgtttttttttttaagaaaattctggagagagactgattttctcttcaggttattagtttagagaatgacaaatcaggaaaacaaatttaccatctagttggaaagagacgactaccttcattaacagaaggtagaactcgccagaatgtaagatgatccagagatttcagagaaacttgtttctcgagtttcagtgctgacatcagggaaggcagctcattcataggctcctaaaagtcaggggataaaaagctgggttagatgatgatgaatttcggtctggagtatcattttatctaaagagtaaaataccaaattcatttaagctatgggcattttggaaagtggactggaatccacttattaaagattttataagaattgttcacaagaattccaaataaccctgtttattctttaaatacttaataacttggtccaaactcctctcctacccccaaaatacttcttttctctcccttaaactttcattttttatgcacctctgaacatttttctatgaagttatagtcactttcacatttactgcaagatgtttttcggatctctccactgccgccttgtggctttagaacacaaatctgtttactttgttttgtgacatatttgaataaaaccatgtatcctgtttagggctggcaatgtggtagtgggagggttggaaattggatacaaaaattgagtcaatcaattgtcactgttgctctagtcaagattccatcgttattttgtataaccttcatttataattcattatgtcattatgtgctagacagctggtctaa[133 bp omitted]cactccagcctgggcaacagagtgaaactctgtctaaaaaaataaaaatgcatatactaattgtaaaatatgcacgattttatatatggctgcactcttatttaaacagcatgctgcacaaatctcacttcttacctttctacttggctgtttctgaaatctttacttgttatatctacatgtctttttagtgccatataatattctttaacatgcatccatcacacagccagttttaaggaaaaaaaatcctaaatctctacaattccttctgacccaaatctcacatgctccctttagaatgtataacaattttctgggtcacagggcatattatagtttgacaaaacgtacccagattactttctggacatctgtgaattttacactccacccacattacttgtctttcctgcatctcaccactgcttgctaacatttgcattttagttggctccattttggtagttttgtctccttgttttaattctcatttccctaatagtaagatgaagctcacatgatattctcgtcatccactcactattcagcttttttgaattgcttcttcatgttctttgctcattttctaattttttttcttttctttgtggaattgaatatatttcatgttatatataaggtattttttggtttaaaatgtacggttactcctgtcaatctgtcatttgcctgttgactctggggcttctcttgatcagaaatccttcgttttttatcacatccatagcatgtttgacttacagcatttgcttattgtctttttgttgttgtttaagaagcccactgcatcctagaccacaaagacattctcctatcagcattacgggtttaaaattcacattttaatctgtctatatttgtatatggcataatggacaaccagccccattttctctgaacaatgagtcagtttttacaataccacccaccaaagcatccatcctgtcctcactgacttatgatgccatccttacacacaagccatcagtactatacatctatagaaatcatcttctgaaatttcttttattccattcgtgtatttgtctgttctggatgagtataatattcttttttattatagcagtgtggttttctagttatccatcatagtgggttcttttatttaaaattagtttcatattcttggagtgtattctttcactgataatcttgcttcaagtattttgaagctctgtgggtgcaaaaacacctagaattatgctctgttaattccttatccttatgaaataaacttctttatccctggaaatacttattactctaaaatgtattttgtctgatattaacatagctattctagctttcttttaactgttagcatggtatgtattttcctaacgtctactttctaaccaattgtgtctctaaagtgagtttcttgtagttagcaaataatttggttttactttctcatataagcttgataatctccaccttttcgttgaggtgcttataccactgggtctcaatggggagaagggaagatcttgccctctaagggcacctggcaatgtctgggtgatctttttggtggtagtaactgggtatgtaggcatgctgctggcatctagggtgtaacagccagggatgccaagatcctacatgcatgcgacagcccccataacaaagaattctctgatacaaaggtaaatagtgctcaggttgtgaaatcttgtgtttttatttttacatttactgtgattattgatatggttaggcttgagcctaaatcaaatagatttctatttgtcatatctgttcttcccccttttctcctttattctgctttattatccttaccctattttggattgattttttttttttaggattctattttatcacctttattggcttattagctgtaactctattttagtggttgtgttgggatttgagtttatggtatctgtctttaacttatcacaatctacctgcaagcgatagtatactccttcatgtagagtgtaagaattatactgtagctcttattttatatatatatatatatatatataaataccataatttatctccacctgcctttatggcgttgctgtcatacattttactttcacgttataagccccacaatacattatttgtgtttaatcagtcaatcttttaaagagatttaagtaatagtaataaacccatacatatttaccagttacatttcagttgcttttcattccttggtgtagggccaaattcccatctggcatcccttttcttctgccctgcaggacttcctttaaaattacttgtagcgcaactctgctagtaatgaattctttcattctctgtatttctggaaaggtcttttgtttgtcttcatttttgaaagccatatgctgggcatagaattctagttaatagttttttttttttttttagtaccttaaatattttgttccattatcttttatgcttgcagtgtttccagtgagaaatctgatgtcatctttgtctctgtgccatgtacataacgtctttttcccccctctggttgcttttacagttttctctttatcactggctttgaacaatttctttataatgtgtctgagtgtaattctcttcatgtttcttattgtgtgatttgcgcttcttggatctgtgagtttatagcttttactgtgtttgagaattttttgcccattatttcttcaaatatttttctcgtccctgcccccgacccccttccccctctatttcagagactctagttgcccagatgcccagtaccaacatgatgaagttggtaaatcttctacacatttttaataggactcacatttaatggatggtagtactttcttttaatcctgacttctcttttatatattctatttctccagttccttccctctaaaagaattctccaacctgctatttcatctttggctatgtaattttgctataaatgccaaccattaagttcatttaaacatatcttcagggtgggtgtggtgactcatacctgtaaccccaccactttgggaggctgaggcggtcaggccacttgaggtcagaagtttgagaccagcctggccaacatagtgaaacccgtctctactaaaaatacaaaaattagctggatgtgatggcatggccagctactcgagaggctgaggcaggagaatcacttgagcctgggaagcggggcttgaaatgagccaagatcatgccattgcactccagcctgggtgacagactctctcaaaaaaaaaaaaaaaaaaaaaaattaaaaaccatatcttcaaaccaactgttcccactttgtcccttttattaccactgattctgtcccatgttgaaatatttatgtttttgaaaatattactcatgtatatttataaatattccactatatctatacatttttctaagcacttcagtagcatctcagactagaatgaagaagataacagaaacctgtgctggttctccatcttatcagtggcagatttttttgtctgtattaacatatctactatattttgtatgtatatagaaatgctcaatctataattcgtatgtgtgtaggaatgctcaaatttctttctgcagttaaccagtttctagatgtttttattacaaaaaaagtgctagaactcatgacaccacagttttatataaaggtaagtttgatagtctagggttatcaagatactggaaaataatggtgtgttcatgcaatataagaacttcagtgcagtgcatgtatataccaaaaatataattgggaactctcatttctaagaatcgatactagaatatatttcaaattaacaaagatgtagatttaagattgttcttaatgttcttagcaacaacaaaaataagtacaactcaaatatccaaatagagcatcggcccaatcaataatgaccctgtcgcacagtaaaacattcaatatcaaattgataagacagatgtgtatttactcataagtatccccaattctgatgttcaaaggaaaatatttaaagtgtaatcactttcacaaattgctataccacacagaaatattttaaagggccttaatggaaacaaaactttaatccatgcttaggatttcacgtgattctttttaggttctttaagcttttctgttttggttattaaaatttcattcagccatttttacaatcacaagtataattatttcaagtttaaagaaatagaaaaaaattcaatggccactgttgatcacttaaatcattcttgtacgtggagaaacaattctctgcctctccacctccacaaactcctacttctcatcctacccctctaaagtctccagtcactgcactcttctttccctcgctttcctaattaacttgatgtatgttgcagtgtccagttctgattttttttctcatattgttttcctactagcatgtcaaccagcattggcaacgtttcgtgccctcaatgaatctgggaatgccttcagacaaagctttcaccatggagaataccgaacacatcgtacttttgtccagcattatgaatgtgatgactgtggcatggcttttgggcatgtgtcacaacttactggacatcagaaaatccataaggtaggggaaacccacgaatatggtgaaaatacaaggggctttaggcatcgctcatcatttacaatgctccagagaatatgtacactatataaacactttgaatgtaaccaatgtggtgaaacttttaacagaccttcaaaggttattcaacatcagagcatgcacagtggactgaagccatacaaatgtgatgtatgtcaaaaggcctttaggtttctctcatccctctctatacatcagagatttcatgttggcaacagagtaaacctgactcggcatcaaaaaactcatactcaaaggaagcccttttcctgtaacttttgtggaaaaacctttcaccgtttctcagaaaaaactcaacatctattaattcatactagaaagaaatattatacatgtaattattgcaaaaaggaattcaatccgtactccaaatttattctacatcaaagaactcatacaggagagaaaccccacaagtgtgatgtttgtgagaaatcctttaaaagcatctcaaatcttaataaacatcagaaaactcatactggagagaagcccttttcatgtaatgaatgtaaaaaaacctttgcccagcgcacggatcttgctcgccaccaacaaatccataccggaaagaagtcttttatttgcagtagttgtaaaaagacctttgtccgtctgtcagatctaacacaacataaaggaactcatacgggagagagaccttaccaatgtacgacttgtgaaaaagcctttaaatatcggtcaaactttactaaacatcagaaaactcattctatagggaggccctttgcatgtaatgaatgtggaaagacctatcgccttaactgggaacttaaccaacataaaaaaattcatactggagagaaaccctatgaatgtggtgaatgtggaaagcgttttaacaataattcaaatcttaataaacacaagaaaatccatacaggagagaaacactttgtatgtaatcaatgtggaaaagcttttagcttaaactcaaagctttctcgacatcagagaactcacaataaaaaggaaaactcctctaaaagcgtctcaaatcttaacaaacatcagaaaactcatgctggagagaagccctttccatgtaatgaatgtaagaaagcctttgcccagcgcatggatcttgctcgccaccaacaaatccatactggaaggaaaccttttatttgcagtagttgtaaaaaaacctttgtccgtctgtcagatctaacacaacataaaggaactcatacaggagagagaccttaccaatgtacaacttgtgaaaaagcctttaaatatcagtcaaactttactaaacatcagaaaacccattctatagggaggccctttacatgtaatgaatgtggaaagacctttcgccttaactggaaacttaatcaacataaaaaaattcatactggagagaaaccctatgaatgtggtgaatgtggaaaatgttttaacaataattcaaatcttagtaaacacaagaaaatccatacaggagagaaacactttgtatgtaatcaatgtggaaaagcttttagcttaaactcaaagctttctcgacatcagataactcacaataaaaagaaaccctaaaaaaagaggaaggtgaagaaggatatttagagatgacttaccctttgctaaactcgagatcaatgtagaaagaatcttagtcgaagcctaattcttcgtggattcatgctgtatggagtatcttggaaatataaatatgtaaatgttgaagaaatggagatgtgatcagaaatgtactttttttattgcactgacttgaatctttggccaaggcaggtggttcatgaggtcaagagttccagaccagcctggtcaacatagtgaaacccc[131 bp omitted]cgtgccattgcactccagcctgggtgacagggtgagactctgtctttagaaaaaaaaaaaaaaactgttaaatgtattcaactaaatttgaaattggataaggcatttcctgtggtaagcagtgataagctaagaggcagctagaaggctacagtgaacattcattttgctgtttgtccataatctactttcactggattaacaaatagaggcagctatctaaagatgcaaacttttataggctagatgatgcaaccctaatttaagcgtaagtaaggaaaacaaaagccatctcttctgggtgaattagaagttttggagaacttttgctagtagacagtgaaaagcaaaaagctgatcatggatctgaactaaagggtaaagagttaggaggggtaacatgagaaatccaaaggtcttgggtctgtggtcaagatggtttctgctgtcttgtctaaatggtcgggcgcagtggctcacgcctgtaatcccagcactttgggagactgaggtgggtggatcacttgaggtcaagagtttgagaccagcctggccaacatggtgaaaccctgtctgtcccattaagaaatagctcatttgaaataagtgaaagaaaattgaatgaagagactctttacaaaagtgtggaaagggttgtgggaaaccaacaagggatttaccatccctagccctgaagggaaagcaggagcgtggtgcctttgtagtaaaaacacaaaaattagcatggtatggtggcgtgcgcctttaatcccagctactagggaggctgaggcatgagaatcacttgaacccaggaggcagaggttgcagtgagcagagatcatgccactgcactccagcctgggtgacagagcgagactgtctcaaagccaaaaaataagtggatataactaagacacccagcctccctgaatagtttgcaccattcttatatgtttctagagaatcaagaagaaatggaaaaattgcaacaattctaggctttagattcagaatatggagaacctattactgggaatattatgttatttgaaattgatttcttgttgtatgtcttaaatgctaagctttctagtatatgctaacactagcatgtaatactgaatacatttgagccttgtatagaagtcgaattactttcccaaatttgttctcataaacgtcggtggcaacttgcctgtgtttagccaagtgggatgggcatagttaggattggcctcaatccatagacactattcagtttcttcatgctctcacctttctttgctttctcagatatgacaggagctgccacagagctcaagtgttgtataatccccaggtgtgcttcctttccatctgcctcattacttgtgtgttgaggcatcagtacgtttatatctctaaggaaaggtgtatgtgtatatatagctcactttttacaaataacagacacatcagttttatagatctcaagttaaatataagccaaaaatgcaactgaaataatttagctcagtacaaagaaaatattgttatgaatattataaaaatgggagtggctattgggataaagacaaaaattatacatgggacctgtcatccctaattttggtccttaatatcctgggttaaagttaaacaggagccatttcatatgtttcaaatacacgaagactttccaacacagctcctatcaggtcaaactgctaactctaaagtctagagtgagaaaagtttcctaggacacaccagaacaacttgttctgaaaagcctcatatcccaaattcaccatcactaaactcaaaaatttttcattgacatctaacactttcttctttgtatctctgccatatttcctaggcgctgtcactaattcctaaacccaatgtctccagttttgtaaaaaagataaaagaatagccatcatgtaaatgttaggctattcataacattctcattggaaagtttcagcagaaagttttatattttcattggggttttaatattaaaatcacataacagttctattgtttaagcaaaaataacagatggagagagaagttaaatacttcaatttaggctcaaaatatcatctgcacaccaatgtaaatgatgcatcttttgcatttaataattccttatattttcattctcacatatttgaggagatataaatctaacagagcgtttgtggattgaatggaatccctccctaaaggtatgttgaggttttaactgccggtgctcattaatgtgaccctatttaaaactaggatcattttgaagatgtaatcaagatcaaatcatactagattagggtgggtcctaagttcaatcactgacttcataagaggggacacaagacaactggctgttgaataaatgctttaacccttttaaagattaaattatctctgaagataacttccatagaatgcaaaattggagtcagcacagaatatgatccatgtacctcatataaacaatactagccagtgatttgatgcagagacctatctcttatcccccaccttttgacctaaaacatatctggcctggataacttttaaattatcatggggtataagagtattttctccattgtcagggaaccaatatgaggattctgccactaagtctgtctccactgtgcattctgggactgaggaaataaccatgggatgcacgtgtgtttccactggcagaagcaaaccctctgggagttggattcaggcccagactcatctatctcccgaccttcataagtctccactctgatcataggccactgtagtgcttgggaacagcaagaattcatataatcaaagccaatatccaaatccccatggaggtctgggtatgtccttctccctcatgcatggccacggtggtaaatgaccacagatacccctgggaaggtctggaggaagatctgcatgatgcttctatggctacattgcaggaaccttcttaaaaggtcttcctgaagccacttcaggtctaggaattggcttaagtctcaaagttgagtaaggtgctatgaattcccaatataatcccataagtcatacttctgcctaggagacccagaaattgttcacctatatgtcaagctgctccttcgaagaaagcccattttcattatacggtctccatgacgcactagctgtactgccaggcccaaacctgattaccagtctttcctaaggcatgctgtaacagtgtcagctttgtttccaaaggtgaggtgctgctgcatggcctcttccactccccagaatctcattttcattttgaggatctgtttcctggggccatttctggtaccacttacagaatcagtcccatcaagaaatagctcatttgaaaggagtgaaagaaaattgaatgaagagactctttacaaaagtgtgggaagggttgtgggaaaccaacaagggatttaccatccttagccctgaagggaaagcaggagggtggtgcctttgaaatctgtcactttggcttagctgattctatgttccctagaactcccttccctgtatgtttccagtgagggtgggtcacagacgacattttggcgtgagatctggagggtgctcgcagaggagcaatcatcttgcttttatgcttagcaaggcttctgcacccgacacatttcttacctgctggttcttgttggcatggctcagtagatgagcctgtggctgctctcctttccccaggatctcctccagctctttcagctcctgggctaggtgtgtgcttagcaacaccacaaatggcaccaacctctgtaggacacccacatcgtttaggtagaagacagtaaaaactgccacagctttgtctgtgggttccagcttgtctttattctcttagtgttcactttcactacttgcttggcctgcagaattaaagtaccagcatcagccatgaggacagtcacataacagccttcccgtaatagcctggagtcaaatcttgataacaaatttgtcatctacagaacatacatatggctctgctgctctgattgaactctaagtgatgcaggaaggaaatgacttttgggatctgggaatagctctagctgcggaagagggccacaaataaggtctcaaccagacacctgatggcaagagacctcagctgatgcagttcatagaggtctgccccaagcatgaggagtggggtagacagtggttctggagggacagagtatccaggagcatcaggcttctgaagaataacacttggtctagatacgatggaacaatgtgttttaggatatgcaaagaaagttagctggagattttctaaccagtcagactgatcttcaaatatacataaagtccataggcaaaccgttaacatataataattcagagactgatatgtccatcttaaagaataagctatcttttaaattagactccaggtgaacaggaagagaagagggaagaagagattaccaactaatttcattattgactgacagtaagaaactaatatactatcttcccccttattccctgcaaataacagggatattaaggcattatataaagatatcagtatattagtaactgacagaacaaaaatacaaatgctccacaacactgtagtgaaagacaaatgggaagataaaataatctggcaaaactgaaactaaatgtgtcatatcaataacaccaatttataaaactctctcattctctcatataatcttattccccatttcattgaaaaatagaaacaattctaaaataaattcacaaacttctgtcacatcaacccatatgtgtgagccagcatggcatgaccattgcctattttcttaaaaaggctacctttcccccttacacatagattccgacctatctcacctatgcagaacattattccaagatttccccgtctatggaacatttcccttaagtgtataaacatgcatttatctctatctctagaaagaagcctcctttgactacactttactctcgagctacaatgccatttctcttgcctttagtacgacttcttgaaagggttgtttgtattaactgttttcagcgcgtctcctctcacctttcttgaaaccactgcattcttatggtggttgcctctggtagctagcctgtgagatggctccagaggtctctacctcctggtactcaggctcctgtgtgatacccttccgcaacatatcaaggttggtctgtgtgaccaattaagtacagtgaaagtgatagttttccaaagctaggttataagggaaactgtggctttggatcactcattctgaggaatcaatgccggctgccacgttgtgaggaactcaagaaaccctatggagaggtccatgtgatgaagaactgaggtctcctgctaacagctgtgggagagagccatggtagaagtggatctttcagccccgtcaagtctttacatgactgcatccctggtcaacatcttgacagcaacctcaaagaccttgagcctgaaccacctagccaagttactctacaattcctaaaccacaaaaacaatgagatagtaaatgtttactgttttaagttgctaattttggggataatttgttacacaacaataaataatacattaacctgttatggggttgaattgtctccccaaaatgtgtgttgaattcctatacccaagtacctcagaatgtgaccttatttggaaataggattgttgcagatgtaattatttaagatgcagtcatactggaggagggcaggcccttaatccaatgactggtatccttataacaaggggaaatctggacacaaacatgcacacttagaatgccatgtgaagggccgggcgcggtggctcacgcctgtaatcccagcactttgggaggccgaggcgggcggatcacgaggtcaggagatcgagaccatcccggctaaaacggtgaaaccccgtc[133 bp omitted]cactccagcctgggcgacagagcgagactccgtctcaaaaaaaaaaaaaaaaaaaaaaaaaaaagaatgccatgtgaagttatgctgccacaagctacagaattatcagaagctagggaagaggcctggaacagatccttcagaagagagtatagccctgccaacaccccaacctgacttctggtctccagaactatgagatgtatctgttgttctagaacatccagtttgaggtactgtgttacggcagccctaggagatgaatacaccctctatatcatgtctttgttctttggctacttttaagataatctttattaaactagttttgatttctttatgtcttgaaatttggtgtcttattgtgctcttcatttttatcctgcttggggttcattaaacttcttggacttgtgaatttacattttccgtaagatttgaaaaaattgttccaacattaagagataaatttagacaaatttggcacaaaaattaggtatttttgtttttctttactctattagtttcaaagtgaaaggtaacttaatttctttcacaatagcaaccaaatctttgaagtgactattaatacatttcacaggaaaagagcaagatcagtatacacatacacatacatttaaacatatgtatatacttacatatattaacacatgtatatgtgtgtatacatacatttatctgtcctgaaggacataaaaactgaataaatagataaatcatgttcatattgggttctctgaagggccccaaataaatagcacaatttccccccatctaaacgataaaaaattaagtagcagacagggggcaggatgaaacttttattactgatcaaattgagttggaggatgcaacttagtgtgaccattcagctaatgggccaattagctgaatgacagaattagaccaatttaccaatcacaggcaatatctgtgacaagaaattatacttgcaggtcagcccacaatgaagagggagttcagctgagcaaacccagttacccatcactatcttaccaactagataagcccacttcctcatgcctggggcagaatgcataatgtggcagagaagctaggaatgggtatagggaaaatcccactcatggaaatcagaacttgaaaggtaaacatttcccaataaccccataaaagtggcaatcctacctcatcatatatatccatataatgtaatcctaatcagcatcccaggcgccttttgttctcagaatttgatcagtgacttctaaacaatacctctaatgaacatgttgattaggaaatccaagagatttttgaaaacatactaattgacataaaccactggtagatggggttgagtggatattacagaatactaaaaccagagaaataaacactttttggattcaaccatcatccaaattctctttgttgttcaagaatgcttattttcccatgtttttcctactgcaattgccgtcttcttgacttagctgaaagcttcaggatcatgaactagttatcctgtgcctatcttccattagaaaggtcttaggaagggctttcactggctcagctttacaaaatgctcacctggggtataattaccatgggtgcatagagtacaatggttagttctcctgagttgtcacctttgcagataaaggtatacagtccactactagaagactatggagttagcagacaacaaaaaatctgccaaatctgaaaatacaccataaattgagaaactgtaacttactcaactatcaaacaatggtattgatttgaaatgaaggtcagatcctcacacctcgtaacatacactatcaagtaacactgtggggaggaaccaagtaacaatttaacttaaacaatgtttgtttcattattttaaaagggaggcacatttggcataacctttgaattgctgttgaatattttcatagttcacaatgaataatacatttattaaacaaattatttctttcctacatgatttctctgatgttacattgagggttgacttatggcagaaaaattttccatattcattacatttataagattttactcctctatacatactcacagtttagcattgtgtaagttatttgatttgttgctttgttggaatttattactttgttggaacttattccttgtgggatttctgatgtaaaagaaagtttgatttgtggcgaaatgttttctcacatttgttacattcataaggtttctctcctgtgtgtattttctgatgttcagtgagagtccacaggcgacggtaggttttcccacattgattacattcatatggtttctctcctgtgtgaattcttctatggactctgaaggctgacttatggcagaaggatttcccacattcattacattcatatggtttctccccagtgtgagttcgctgatgttcaacaaaggagaacttctgacagaaggttttcccacattcattacactcatagggtctctgtcctgtgtgtgttctctgatggtgagtcagggctgacttcctgcagtaggttctcccacattcattgcattcatatggtctctcccatatagttctctgatgtacaatgaggtgtgagtttttgctgacggcatgcccatgttcactacactcataaagattctcctttgtgttcattctcttacactgactgcagtttgacttcacaatggagattctaccacatttattaaacacaccatgtttctctcctgtgtgtgttctctgatgtatagtgagtgttgacttatggcagaaaaatttcccacattcattacattcataagacttctttcctctatgagttatctgatgtgcaatgagggctgatttcgtacataaaaattttccacattgactgcattcatagggcttctctcctgtatgacttcttcgatgcacattgagggcagattgacaaaagaaggttttctcacattcactacattcatagggtttttcccctgtgtgaattctctgatgcgcagtaagggctgactgacagaagaaggttttcccacattccttacattcatttggcttctctcctctgtgagttctttgatgtacaacaagatacgatttcttgctgaaggcatttccacattccttgcattcgtaaggcttctcccctgtgtgtgacctgaaatgttcagccagggctgacttccgaaaaaaggtctttccacattcattacactcataggatttctcccctccatgaattttctggtgtacaataagggcagatttgtcaatgaaggttttcctgcattcactgcattcatagggtctctctccagtatgaattcttcggtgtcgagtgaggcttgtcttcacacgaaaagttttcctacaatcactacaaacatacggtttctcccctgtatgaattctctgatgtacaatgagggtagatctcttagaaaaggttttcctacattcattacattcatttggtttcctttcagtctgtctccccttttgtgtaatgagaattgccctcttgaagaaggttttcccacatttattatagtcaaacggttgtttcaaaatctgaatgttctggtgcagaataagattttcgttttgattgctggctttcctcattggattgtatctgtattttttcattcccaaatgacttttctcatgcttcccaaatccactgtatccatcaggaatctttctgttttctttgcttttctttgcaacaattacttctgaattagttttcaaactgtttcctcctggattacatttatagggcatttttcttgagggaacactattcatgcccagattaagtgttttcccaaatacattctctctttctgtaatcagtgttttgttgctgaagaatacagtttgtgtcaaatgtttatcttggatttccttgttcttctctaaggcatcatcaatgtctagaaaaaggaacacaattaacggtaattggtgagcctttatatgtttgctatgaaatgagaattccttagaaatgcattgttttaggggttagacttcaggccaagccttccaagattaaacaaatttcaagtgcaaatatctcttacttggttgatttgaagaaatacagaaacaaaaaatacaaaaaagcaaatccatccataccagccactatttaacagggggaaaggaagaggaaactagcaaagaatacaagtacctttgacactttacaaatactactaaacattgagtggaaaaagtaaatagtcacaaggaatagtacacaaagtatgctggaagtgtggctgatggagtgttgaataaaacagacaagagtcaagtaagcacttagagaaagatagtcatacagtgagaccaggtacaacagatatcagaaagatggtcagttattatcaaaacacacaagaaggaagaggtaaatctgaaatttttgcagtgacatggaactctcgaatttgtacagtgcaaagggaagtaagattgtgggctgagtagagctgggactagaggaaggcaagcaggatacccagggcacctgtgcaatcctgagagttgagtgtcttcctaaattttgcatgccaggcaccttgtttgcctcaccctactccggatcctggtgaagcgtagaatggaaagggaaaccgtgttatttctgttaagtgacgtagagaaaaatggaagacaattaaaaagatcatgacagatctctgaatgtctgaaatataaaccaagcctatgacaatggtgggtggggcaagggaggcaacaaagaatgctacagaaataaagtttaaggtgtgataaaagaagaacttgaattttggggataggtaacttaatggcaaacatctttataaatttcaattatttatttggggagaatgtttcagatgtccatagcatgacagttaatcaacctcaatcacttctaaaggtctgggccaacaaaaagaaattcatgaaaaacattacgatgccaactattaccaccgaccaccatggaactctcatttccattggttccacctgctcagttatcatttacttacctgggtagttctgatttgagaattcctccactatccatggctcttctccttgctccaatttgaaaatcacatctggtttgctaacatgataccctgttaatgggaaattacagaacttggaccaagatctttggacatcagagactctgaagaatgaagaaagtacagcttcagaagctgtgcaatgaagatgcccagcaatagctcagtaaagctagaacattttggtgaagggtaggggaagggcagtgaatacatacacaaacttctactgtctaaaagggtttaatcttcttgctcccctgatgctcagggctaaataaattctagaaatcaacatgtttttgtaacacagaagaaatgtatgctcttgggagttgtacagggaaatagtccttacccacagagaccaagttgctgtagttctccagcatcacatccctgtacaggagcctctgagcagggtccagttgctgccattcctcttgggtgaagttcacagtcaggtcctggaatgaaactggtatctgaaagaaaatgtttaatcttgggtgaccaaaattgagtgatatcaaatgtatggtaacataaactataagaagaccactgccatggctaatggaaagctatagagagatgtaattgtgggagggcagaaaattaaaaatctgtcactgtgttcattttttaaaatgaattttaaaaatgtgctgagcttataccatgtcctggagctattccaattgcctggattactaatcacataaaatactaatcttactctttaggagcatacattctgacagggtgacaaaaatagaaatgtacatctttaaagagcaatgctggacatatacacaagatgaagggtgatcacaaaagaagaaagcttgctccatttttgttaccccttccttgagagcataataattttagtcctgaaatataaacagtatgttttataggactgtagccattaagaatatacacagacacaaaacacatatggggagttcgagaactacaatctctccacaggaaaggttagtgaggagcgggacagaggtcagagaatagaggaactcttttctctaattagtagtcttgaaatttagatagtacggcacatcagtaaaacattcttgcatatacgctaacgtacatttacttaggaattgtagtatatttccaagtgagttccagctatacactaatatcaataaagcttaattattttttcattcttttggctgaaatacaagaatagaagtccagtgaattgctggggtgctccctatcctccactttggagatcactgttataaataatggaaatccataaagagttatttgtaagcaaggactggagatttgtgaccaaatgtgtattttgaaacaatgctctagagcataagagttggcaaacttcagtccgtgggcaaaatctaggccactgggagccaaacgtggtcacgctcatttgttacacacagtctatgactgctttcatgtcacaacagctgtgccaaggaaatccaacagagaccacagggccagcaaagccaaaaattttgaccttgtcctctaaagaaaacatttgctgtcccctactctagaaaaatggaaactggcttaaaggtcaaattagaagggaagaaaactaagacactactacaggacatgagcacaggtagttcctgggaaatgggaaggagagaatcagtcctacataacgggaggcaaggagagttgaccactacttgatgtgcagtagatgtaatgtgcatattatttcacatgatcagctgggctgacgctagtagtatatgtggagattaggaaaacaaaacaaaaaagagaatcgagcataggaaatgaaggcactgatctttaccatgctgtgcttgaagtgtctgttgagtaaagaagtacagatatctagctggcagtttgatatatggttctggagctcacaggagagataccacagtgatcagaagcaatatttgaaagcataaataatgaggaaggtctccatgaactgatatgaagtgaaaaaagcaaagtattaaagaatatctataatatattaccttttatgtaagaaaggagatgtaagaaaacacacatggccaggtgtggtggcgcacacctataatcccagcactctgagaggttgaggtaggctgatcgctggagctcagaagctcaagatcagtctgggcaacacggcaaaaccccatctctacaaaaaaataaaaaaaaattagccaggcatggtggcatgtgctactcgggtggctgaggcaagaggatcacttgagtctgggagtcagaggttgcagtgagctcagattgtgccactgtactccagcagcctgggtgacagtgcaagacctcatctcaaaaaaacaaaaaaacccacatgtaaccactacatgtgaaaaaaaattatggaaaggatacaccagaaactcatgaaactggttacattcaggggagaggtggagacagacggaaagaatggacggatgggaacagagtagaagagatgagaaggagtgacacttctctaaaatatctttctatacggttttgattcttagaactatggtaggccaggcgtggtgcctcatgcctgtaatcacagcacttcgggaggctgaggtgggaggatcgcttgaactcaggagttcaagaccagcctaggcaacatagtgagaccccatctctcaaaaaaatttttttttttttgccaggagtggtggcacatgcctgtagtcccagctacttggaaggctaaggcaggaggattgcttgagctgaggaggtcaagactttagtgagctatgattgcaccactgcactccagcctgggtaacagagcaaaacccagtttcaaaaattaagtaagttaaataagcttaagtaagtaaaaaggaaagaaagaaaagaaagaggaaaggaaaagaaaggagaaatgaagggagggaggaaagacaaggaaaagaaaacaaaggaaaaacaagggaaagggaaggggaaggggaaaggaaataaagaaaaggctaggatgaaccctgcaaaataactagccagcaaagtgtcaaggttgtaagtgacaaagaaggaccatcgtgggttgcaagaggctaaggagacaggacatttaacacaacctgggttcctaggttggatccttgaactgaaaaaggatattatggaaaataataagcagaatttgaatacgatagataataatactgtattcatgtgaatttcctggttctgatcactataatatagttttgaaagatcaggggaagcgaggtgaaggaaacacaggtattttgtgtatgatttttctcattcttcgtatttaaaaataaagcagtaaaaaataggcatgctgcctccacctctgcagacacctgggctttggcctgctgtatgtctcacctcacccacatgaccatcctaggtcacccgtctttcttttctttgatctgctatacatctttctactgacaaattttattaggtaatttaatgaggcctttcccgctatcaccacttaactgtctcttaaaccagaagtagttacattatccattttatttcttccatgaattacttcctctgaaggacctataagcttcctgaagataaagagtatctcataattataggcacaacaatagacatataaggtcttaatgactagaaagaatgactggcaaaaatattagaaacaaaacgccagggagaaagagtgccagggaagagccctcactagaaagttctgtacttgctcaggcagacccagtgcacttcatagcagaaagtccaaagtaagaacagtgaaatgtgttcactttgtgagaaactgaaaggtgcttatgacaaaagaaaaagaaactcgattctcccggtgactcaggtccattctgcaagcaatactgtaagtagaatgatgatccattcagagcagaggagagttcaccatttcacacaaaacaagattacccaaaaaaagaaatgatgagtactactatgagcagggatatggctactgaggacatgtgcctacacctttaaaggctaatagtcttacttgtgaggtagacagataatgaccagaccctacatgtaatgcaaagaagagggccagcattgctctgtaaacacatagtctgtggacaaagaatatgaggacaggaatgggtcctgtgacgagatggctcctggctatgttcacaatgtaggcagaaaaggggtagaaagtcaaggagcaaacagtagaaacacggttaaaagcaagagtgtaaaatttggggcatgttcaggagactaaatgcagaccaccatcgttcttcagaggggctcaatgtgggtggtcccttccatcaggggcatgtggcacatctgcggagacatttttgcctgtcagggttctgtgggatgctgttggcatttggtggaaggagagggaaggaaggatggtagagacactgcaacatgcaggaccttctcctacaggaaagaaatgtcccaagtcctgtataactttctaatcttaaatattcatataaacgaaaaatcctgtttataatgatctgagcctagaaccttattccatttggcacttgaacacatagtatttttatatattttttatgtatattaaattttcttcaatgtaatagtggatacatcaagcacaatttgtatttgatttgaactggaacttcagggattttcactcttgaaaaatatcacaaatggcaatgctatgtacagtatttgaatcatgacacatcagtcccatatcagtgagaacttgtaattatcacgttcatagaaatttaacctaaaagtaatctgtataaacaccagactcctcttcttttactatagttttatctgggcaagtctatattaagatacatatcatttttaattacttttttatttttcctctatattcgagttctattgatttttttaaaaattacacaagtaagttgtattatctatgatctccaaaataggataaagggaggatggcttttagttgggatttctagaaaacagatcctaaggcaaggacttggtctgcatcattccatctgggaactccaagccggggtagtgagggtgagggaagtaaggaagggaggaaagaaaggatgtaaacaatgagatatgagaggcattagcatgctgcccaccaactcactacaagccccaaagaggggcaagtttcctcagcaggagcatggggtcagcacgtgggtcagcacatgggacatctctgggaggaccaccaggagaaactaaccttgaaatagtgcacagaatagagaaaggatggggaattcatctgcccacctccttctcattttccatttcccttcattcaaggttcacccacggtgagttaacttgcgcacacttccaggttgcatcatctggctccaccatctggcccctcaggaagctggtaccacacctcatggtgtgtggtttcatccaagtctaaaacaggaggcagcctggtgtgggtgggtggcattaactaagagagataaaggggatggcagaatatggaaggtttgcatcccaatatagctcctaagaaagtatgttctgtaaaaagatatgggtctggcagagttgagaaccacctcagcacagtttgaattgcttgtgtaatatctttctctttcactagcacatgagctccatgaggacagagacagtatctccttcattcaagctgaatgtagaccatctagcatagcgtatcacacacaattgtttgatcaatatacagttgttgaatgaaaggtccagagtggtaggaactgagaagaggcaggaaacggtcatgacatacatagccttacaggtcataccaaggatgctgaacttgtattctgcaagtggcgtggaacctcttaagtcatttctgtattaagacatgatcacgttggcattttggaggaattggtcagtgtgaagaacagccttgaggtgggaagaggaaggggccaagcagactgctgagaaagctactaatattatgacaacccacgagaaactgaggcaggagaggaggagatggaagtgaaaggacaaattcaagaaatgtttatgtgacaacattagcaagctcgacaaacaggtatggtaggacgtgaggaaaaggagaattaagatggacttcaggccgggcgcgatggctcacgcctgtaatcccagcacttagtgaggccgaggcaggaggatcacgaggtcaggagattgagaccatcctggctaacatggcgaaaccccgtctctactaaaaaatacaaaaaattagccaggcgtggtggcgggtgcctgtagtcccagctactcgggaggctgaggcaggagaatggtgtgaacctgggaggctgaggcaggagaatggtgtgaacccgggaggcagagtttgcagtgagctgagatcgtgccactgcactccagcctgggtgatagagtgagagcccatttcaaaaaaaaaaaaaaaaaaagatggccttcattttctggcttgtctcgctggtcagatggaagcagcactgatagggaaaaaagaagcagcagcacattgagcaagttgtaagtattatttccatgttggatatgaggactccatgtgccttctggacatccttacagagatgttcagcaagaatctcaagctgaggtcctcagaggcagaaatacctcagagcataaagactcacaagttaaaaccacaaagggcatgaaaaaaaatcagaaagaataatgggctaacaatggcatagcaatgttcatgaaacaaaagattgtataaaagatataaagaagacatgattacaagctgggtgtggcagctcacagctgtaatcagtgcactttgggaggccaaggtgggaggatcacttgaacccaggagttcgagaccagcctgggcaacatagtgagacctcatctcaattaaaaaaaaaaaaaaaagacatgattacagagctacaaagagaatcatgtgagtgataccacagacattatcagaggtgcctattagggagggggcagtcatactgtcaaatgcaacaaagagtttggtaaagtatgaactgaaagatactcattgggtttgaaaatatttaggttactgctaaatttttccagaacagatccatcagagtggtgggggcagacaccagactgtatcaagtgggttgaaatgagacaggcacatgaagaagttttacctacagaatataatattgaattgttccctctagaacttgttttataagtatagctgaaataaagttatggggcattatttgaggaacactattttatttgttataggttttatccatttattctaggtcttatcactggatcatagacatcacagagaaccatcagaatgctgcctgttcggatgacactggattggttccctgtaattactgtgctctgcctgggtatagaagtcacaggaaacccataccatttctttctcagctgtttttggcagaactgtctctacttcacttactcaaagatcatccaagaaaatttttagatataaatgatgggaaaaccacacaaaaatccagtgtaagggctatctcatattgtctgggcctttctggaaccatttgagtaactctataggaatatatgatttctgtatatctatgtccacttttccagtattgatcgaatactcttctctgatgctgaattttatacatttcgtttcatctgcaaactactctaaacctcttgaaattcactgtataatgtgagaagtaaatccctgagcaacttacctgaaattttttcattttcatgttctcttgagaaagggccaagagtgttgaaagcagagctgggtaaggaagaatggcgaatggaatcatgagcgatttggctcacacagcagctctacaattacctacaaagccacacacccatttaaaaacatggccctttgaccagtctggttcaggaagcaacatgttgaggaaacgttcacttgtccatttatagttctagaatggtctcatagagcttttcttactgagtgagtgtcaacaaatgttttctactgaattactgtcaatctatgcctcctttgaaaaaaattgaaaacgtctgagtccaattaataggagactaggtcaacgaaagttagtatatacaaagcctggaacactattttggcattaaaatggactctaggattaaaagatttcttggaataggaaaatgatattatgtcacttacctgttttcctactaatgtgtttagccacttgagatgacagaatccagagagaatgaatgaaagtgctttaaggtgtttgtctttttgacagtttggtttcccttagctgcagtttcacaagaggaccttttactaagaaacttcttgtggtaggtaacgtaaatgtggtagatgacaaaagccctgacctggtactcaaaggaccagaattcagttattggatctgtcactagcaaactgcattactgaaaaaaatatttactaagtcgtaattttaatataagataaattggtttttagtctttcctttacccctatcgtgtagctctgtaaggggtaaactcagtaaatcccaggtgaggtgatgaacatggttggtgcagctctgaataaacagagggtggagatggtagggaatgacatgtatgtgtttaggaagtgatgaagacatcatttccttatttataaccagtactccttccctccaacccaggactctcgcagatacctccagtgaagtgtcttttcctgtcaaatcttgaccctgcccattccagctcacatccttcttccgaaagttgaactgaactttgctgagctataataatcaatggctgcaagactaagtgcatcagcagaagttctggaaagaggttctagctacttggatgcgtaaacctttcaccttcaccaagcgccttcttcgggcaaatcagggccctagagagagctcgcccgtggcctgcaggtcaggagcccaatcctgccctggctgcctcgcctcccgaccacaggaaaccctccctccaaagacagggagagcgcgcgtccaccctccgcagacccgaggcccgctccgcccggccccaccgttccctccgacgcccgagtgctcagagctcgccgccagcccttcctataggttgtgggtgcacccgcttcgcctccagttcgcaccaggtccaagtctcggcgggaccagggattcacgggctgcaggaccctcacccggaagagcctggcgaaccggaagggcgtccaggtaaaaaacaggaacagcacatgcgcagaaaggcccccgggccgcctttcccggggctctcccgggccccccgccggctttccggaccacagtccccagaaggcgtcgcggccaccgccctaccctgagggatctttgaggagcttctgctttaactacagagtttaggtgactgctgtgaatcatcaatacgaaaagtaaagtttcatatccgtttcaccgaagtctatagatgagaaaggaaaattctgcgaaatgaaaatgactgctaaagatattccagcagaatataatactaacgacctgcagaaaatttctcccaaacaggatacaaaatcattgctggctttcaatacgtgaaggttgaaaataaatcagaatatctctgaagaaaatgaactattagccgtaaccccaattcccagagatatccgagtttaacattaggtgcacattcttctgacagctttacaaagaggaactcatataggtctagtaatttgttattttttaaattagcaatatagttaatatactttaataccacgaattatctcatatacattgtgagtaatatagaaaatagttttacatccacaaggaaaatacatacaatcatgcatggtttaacgatggggatacactctgagaaatgtgtctttaggcaatctcgtctttgtgtgaacatcatggagggttcttacacaaatctagacaatatagtctactacacacctaggctgtatggtatagcctatttctcctaggctacaggcctgtgtggcatgtcactgtcctgaataccatatgcaatggtaacacaatggtatttgtgtatgtaaacatatctaaacatagggaaggtgcagtaaacgtacagtattgtaatcttatgagaccacagttgtatatgcagtacatcgttgactggaacattcttatattatgcatgactgtatatgaattgtatacatattgaataaatagaactttataaaactttactcattggaaggcatgaaagtttctgacaaagttataatgtattattattcaattccagaaaagaacaattagcgactggtggtagctagtcttcaaagatggcccccaatgaactaaacttcccagtattccaggcttgtatatttccctcccacgttgactttgactgactctgtgactctctttaaccaaaagaatgcgtcagaagtcacactgtgccagttccagaaataagccatacaaagtcctggcagcttcagctttgccctttgaagagtccttagacgctgtgtaagacatgcagttaacctgttagaccaagtggagaaaccaggagaagtaggaagtgagaggccctgagaccacatggaaaaagagaggcccatctttcctagcaatgcagctatcccagccttccagtcatccttgcctagagacatcagacatatgagtgaacattctaggccagtgaagttcctggatgacttcagctccagatgaaatcatatagctgatgccagtaaacatacagactacaagaaataatgaattttattattttaagcctctaagttttgggtggtttgttacacagcaatagctagctaagcaccaacaaaagatgatttccaagaatataatatgaaaagctgccatttcaaatcattgagaaaggcttattgttaaatagattattgaaaaagtgatgtgggacaactcactaaccatttggagtaaaaaactaagattcccatctcacacattataatcaatatatttcacattgacatataatttgaaatgttaaaagcaaactcacagactaagtgatttttgcattacttgctagggaagctcttttactgaaatttattaaagcaaagtttcctagtcatcaagaaaattgaatatatttctattcattcaagtttagatagtctcaaatgttttgctacttttgtaattgggaacatttttctatcttattttcattgccatgtaaaagtgacactgtagagaaaagtattgatcaatttggctatgaaaaattgaaaaaatcttgcttcagaaaaaaatagatttaaaaagaaataaatggagaaaataaagtggtttcatatatatgagaaggattggaaatagactcaatttattaacagctcttagaaatcagtaaagatgaggattcaaatttgtttaaaaaatgaaaaaagaacatgaataagacaattaatatagaagaattgtaaaagagccataactatacatatgaggtaatggccaataatactctagagcaaagaaatgcaaaaagtttttgattacgtacttttttggcagactaatttggcaaagattaaacggaataataaagtattggcatgaatttggaaaaaatatttgttcccagacaggttgggtgggagtataattcctatgacatttctagtagacattctgtaccaaaattgaagattgcatgtcctttattccagcaactcagcttctaggaacatcttaatcaaataattaaatcagtacaaaaagatgcatatcaagaatgttcctcgtaatgattttaatcataatctttttttttgtagatggagtcttgctgcaatgcccaggctggagtgcaatggtgcaatcttggctcactgtaacctccacctcctgggttcaagtgattctcctgtctcagcctcccaaaaagctgggattacaggtgcccgccaccatgcccggctaattttcgtatttttagtagagacgggatttcaccatattgggaactcctgacctcaagtgacctgcccacctcagcctcctaaagtgctgcgattataggcgtgagccaccacgcccagccaatcataataacttttaaaaaggtggagggaagcaaccaaatgtctaccagcaatgtgaaggtgaagatagaatataagtagccatttttaatttatttgatgtaatatttgaattacaaatataattttcatattttttcagatataactacttgtcttgatatgatttattgaaaacatcattttttgcccactgctttgcaatgtcatctaaattcttacatacctcttgtctatacatgttcctgcaaggaaccagaatttaactttttacaaattaaagaaatttcatacatattaacattaatctgctttttctaagattttctggatgtattttaaatactctgtgaagggaaaccaaaaaaaagcaaagaaagcaccaaaatttgccactattttaacagaaattttattaaataaacaaaatttccaattcttcaagcctgggtgacagagcgagactctcaataaataaataaataataaaagttacagggatggaaagcacaaattcagaaagtgggagtgatgatgaaacaggttaattctactgtcatcacttcgtttccagccacttgaggatacaatagcatatatcagccactggttccatacataagctacatcctggtggacaacacccaaaactcttagggtgtcattccaaaacctctgccttagctgagcctttactaagcaatatcatacttctatcaggatggctgttttaggctgatgccttgtatggtaggattaattgatcccatagagcagtggtccccagactttatggcaccagggaccagttacatggaagacaatttttccatggacagggttggggggcattagattatcgtaaggagtgtacaacctacatccctcacgtgcgcagttcacaatagggttcccacttgtatgaggtctaatgctaccgctgatcttacaggaggcggagctcaggcagtagtgctctcttgcctgctgcttacctcttgctgtgcggcccggttcctaactttgttgggatagagatcttgggtcttggaggtggcagacagttccactggaaataatgatgaacaaatgtcttaacatttagtcctccaggagacaattctgggagcattccatatgcttctcagagttattggaagaatcaaatccctgttgtccatagcagggaccttactttcacctgcttacattggcgtttctccttctttatctcattatctccagtctctcatccctgcttcctggaatcacctcccaaataaactctataacccaggcactgtatgcattttacataacatgtacatgacatcttacactgtaccctgccctctctcttcctagtatttctgtttcagccggaagaggaagcaaatgaagattgacttgaagattagagagttgaagtaatcttcatttattcactttggatgaagattgtagggtcaatatctaggtcctggtattctaattactaaatagatactatgtttatggtaaatgactgcaggtctgtctatcctcaaaggaagcagaaaaccttggattctgctgagtttttatccagtgggagattccctcaaaaaagtttaaagagtggtggaagactaaaatttgctacttaaaaattatttcttaagatgtgctatttagcataccagctacattgactatctgggcatggttcagatgggttctgtctgtgcttcagggtcttttgctgtaatccaggtgtcagtgtgcttgcacctgagctttataaggatgtgtgaagtggtctgtggcctgttaggaacccggccaaacagcaggaggctgtgttaatacttaaaaaaaattagcttttggtttggttaatcctttctattgtttctttttgctatttcattgattgcttccttttatctgcattatgttcttcctcatcattaaaaaattattctgttctttgctgggcacatggctcacacctgtaatcccagcactttgggaggctgaggtgggtggatcacttgagcccaggagttggagaccagccctggcaacatggtgaaaccctgtctctaccaaaaatacaaaaattatccagtctcataagctggtctcagaataaataaattaattaattaataaatagattttttaaattatcctgttcttattttaacatcttcagttagacacagtcaatataagaatttaaggctgggtgcagtggctcacacctataatctcagcattttgggagcctgaggcaggtggatcacctgaggtcaggagttctagaccagcctggccaacgtggtaa[131 bp omitted]cacaccactgcactcagcctgggtgacagagtgagacttcctctcataaaaaaaaaaaaaaaagaatttaaggttctagatttccctgcaagcttttttttagtgacctccactcaaatctacattttagttgatgagatatacaaaaaaacctgatactgcaaaagattatttaatttaaaatgtagtaaaggctacaaaggagaaattcacataatacaggagtagacaatgtctgtgggttagagagcgcttcttctgggaagagatatttggacagtgctccaaagggtggtgcagaggaggaaggggaagaacacttgaagcatagtgtgaggcgaagagaattataaggtgttccagagctaaagtaaatgaggaggagaaagacttgcttcccacactggaggtctctctgagtctggaggtatcacaacctctccctgttgcaaggtccctggtacccaaaacaattttgtcacacacaccatcctgccccttgtgagtcctgccagcccagctttcaggggcctggcccctgattccttcttttcttatcagggtcattcagaatccggaatgactcttatttccacagagcttcaaatcccacctctctctgaggtagaagaccaacagggcttgttttctggtcacaaccctgctgatcaaaacaggatctgatccagacaggatcaagtgaagaaaccagcaggaaccagcagatggggacaaatgtgatccctggctgccctcattgctcatagcgtaagatactcccatagtgccatgacagttttaaaatgccatggcaatggcccagaagttaccactcattttctagaaagctataaataacctgcccctcaatttgcattgatccactccttaatttacatgtaattgaaagtgggtttacatgagtataaatagttaccaagagtctatagtttgctgactcagggcatactgcctatgagttagccctgctctgcaaggagcagtactgttgaatgaaagattgttttctgataccaccagctcacctttgagttctttcctgggtgaaggcaagaacactcgtaggttaagccccactttgggggctcagctgtcccacatcacctttggtgagaggaggaccaactgtggggattgtgaattcaaacctcctgaaagctaatgttgatgggaggtgagccagtgaaatggaaatggcacctgaggcaagatcctgtctaagtagagtttagccctttgcaggacaggtgcaatgagtgctatgagggagataagaacaagtactgtgggcagagaggagatggctgctcaccctggacagtgggttcagaagtagcctccaggaggaagcgaacattcagtgtggatctgatagattagaattggcagccaagggtgaagaggattcctctggtcagaaggaacagtatgtgcagaggccagagagtgtggtgcagtttgccaggtttgagctccagtcaggcctatgaatgacatggctggctagttgggccttgtttgttatggtgaagcatgttgtattttccaaagatgcccattacaatatctcccatcctactttctcttcttactgcatcactcccccatcaaaaggtggactctatgtcccctcccctgaaacctggatagaccttcatgactgcctcaactaaaaggatatggtggaagtgaggccacgtgactaacaaggcctgggcataaaaggcaatacagtctccgcccagctctctgtttgaggatgctcactcttgggacctggacgccatgccatgaggaagcccaggctacatgaggaggccatgtgtggacattgtgggtaaaattcccagctaaggtcctagccaacagacatgtgaataagaaagccttcaagaggactccatccccagccaccacctgcctgagtgtggaccgcctataagtgaaccttcagaatcatgacagataataataataaatgatgttgctttacaccaataaccaataaagatggtcaaatagtgatcaaggagaggaattccaagccaaaagaaaggtataggtagggtttactaccaaaccaaagaaggaggagttccagcattgcaggagggaaggggagggcagggcagaggaggggaggggagggaaggaatggagggagagggacaaggtaagaagaaggcagactggcaagcccacactggatagtgtggtttccatgaaggccactaagtggcagcattggcacaggccagtggttgtcagactgactttgttgttgctttgtcaggcgacctcgctgtgaaggctcagtgtctgtggctgcaaggtaaagaaggcctggctgatagcaagtgctgaggaaggcctgggaaggcctagctcttgctgatacatcaaataatgtcaacctcccacagctgttaactcgagtcaattcatttgtggtggacgtgttgttttttcttctggtcctcctttttctcataacaaacacttcaattttcctttggggaactataccaccaccactcaggtctcctgtatacactctcataggctgtgcactgcataactccagagaatccatccattcagactgtgatgagtggtgcctactggaattgaggagtgcccaacctgtacaactgtcaataacagcccttgaaagatggtccaagttgcccattgtgctcctggtctagatacaagcacattgtctgaaccaagcatatcatggatttgattttgaatcctgagtagaatgttcatcctgttcatactgacatgaatgctgtgaagcaactgcccattagctccagctacatggatctccagagttctccctggttcttttctttttttgttttccaactccaatagaaatcaaattcccttttgatttagttcgccagagatgctttctgttgctagcaaccggagaactccaaaaagtcacaatctgtgcctcaaaactttctcaaggaaccagatttcagcaaaaggtcttgggtattaagattaaaactagtctttattcattatccattcatttattcatccaacaaatattttgggggtacctactatgtgccaggcatggtattagattagaggactcagcggtgaagaagccagtcatgcatggtcactgcctactcagaatctggtgagaaagaccacagtatgtagatgattacagacagctatagaattccaaatggggggaagtattgtgaaagaatagaatgaaatgcattttaggcttgctacaagcaagcagtttctacctcttataacagttaatcctcagaacaatgctacatgttaagtaatactatagatcctatttcacaaatatgtaaactaagcttacgttaaatataaatatacatccaataatttataaatagaaatagaaatagaattttcccaagacttgggtctttcaatgctagaagtggggcagtcctgggcaaacagggacaagttgtcactctaataaataacttgcctgtgaccacactgttagagagtggtggggtaagtattcacttcaggtctagttttaccctgaagctcatgcacacaatgactacctgacaggtgcccttggatgttgtgggcagtgtgtggggaaagggaggagagtgggagaggctggaggcaagcagaccaaagaggagactgagacaatggcccagcacgcaatggtcatggagaaggaagtaactgattcgatgtgaggggtggagggggcaggagatctgggatgacccagggggttaggtgtaggagggggatggaagtggtctgggaggaggaagaattcaggttggccatgttgggtttgccatctgggtccaaatgccagtaggcagttggagaagaatctcagagttagagaattcttgtagctcagctgggcatcgtaggcacttcaaagatgatgccaacagggtccctgctctcagagcttcctgttaggttttgaagggaaggcgagggttaaagaaagacacgcacacacacagagggtggctcaacagcaacataggtatattgcaaaaacctgcagaagtaggggaccagcttaatgccagagccctctgctgattacaggctggggtacttataggtatggggaggaggggtctgggcagtatggcttgctgcccaacaggatattgaaaagatgtgcttatgatcaggtagtctggccctttctccagtgggatgtgaatagggttttccttggacttttgcccagcaggatatgatacggatgtcccttcagttgggcccttgcctagtggggtatgataagaatgcttatagaggctttcgaggaagcatggccctactgacagcttgactttggacttcgatcctccaggacagcaaaagaattaactcctgttgtttcaagccattcagtttgtgttaatttgttacatcatctctaggaaactaaaacacatgacatggtccttcctacctcagagcttgcgtacttgctaccctgtacctggaactctcttattctgactcgatagatggctggttccatctcatcccttcagatctccactcaaatctcatctcttcaaagatggctcctccaagtattccagctaaagtctctcccttaagttactctgtaccacaatgtcttctttaattttctttataatatttatcactttgaaattattttatggattttttgagtatgtgtgtgctgcctgtttcatcccaagagagtgcagcttatataagaagcacagctgtatacccaagacccagacatgtcctttatatattggaggaacttaacaaatatttgttaaatgaactgatcaagcaaagactcacaatggtcaaaaacggaaatttgcacagggttacaccactaggaagccacagagtttttatttaaacacaggctgtctgagtccagagcccaagctcataactattatgcaattacgctatactaactttgatgcaagggagaaataaagacaatttgggatgaggtcctattaataagggaagagacagaaaagagattaattctaattcagttattggggttgagatattacacaatcagctggaaaataaggtttgatttgtggagaagccctgacctggaagatcagccttaatttagggccagaagaaatctcagtagaactcagggtagctgtccttcacccctggtgctgaatttaaggttagtgcttgataaagccacctcatggcttttgtgtacaaggtctcaagtcattcctcctaggtactcatttcccctccactacctgaccttgttggggcaactcttccttcattgctttgcttaattcctgagctggcttatttagtccattgggcatcttccctgtctcctgtcccagcttcagtccagtttgggagaggaaactccccttcacagaatatctataaatgaacttataaaagatttgaatctattaatatactataggattcagtttacaaaggcattagagaaaaaaataagaaaaaatttcaccactactggcatcgatcattggtttaacttctggtttttctttcagcaggagaaaggcacagcagttgttttcagagaagttcagcaatatctccttgctgacaaagcttcaatttcaggtcttgcaagtgcttcagatcccctgagggcttgctgggacccctatttggtctgcatttcagtagtccctactataggccttggatataagaaccctttatcccccatcccctgccaactgaaagagcacacaatggtcaaagctagagcaattcggtaacaaaataaagtggtattagattataatccaaagtatgaaataaatatcatgagcccatacagataaaaaataagtgactcaataataaataaatgaggggagaatagacaaatcatatttgcagaatttcaaatcatttatgtagctacttctccctcaaggaggtaaagcattactccccacctcttaatgtaggcagtatctagtgacttcctcccaaagaggaaggcaaggaaggaaaagattagcttcacagtgaaggaagcttctggcaaacactccctcagctaggagatgaaggctacatcagcagtggtaagtcatggtgataatatgcacccttgatatgatgtattgagaataaagtctctccctttatggggttacaaccttattgctttgcagtctgtggaggagtttacctctgtgatcttcctcaaaaagatccataaccccagtctaatcacaagaaaaacatcagacagatccccattgagggagaatctacctgagcagtatgcctcaaaattgtccagatgatcaaaaataaggcaagtcagagaaactgtcactgccaagaggatcctaaggagatgtgataactaaatgtaatgtggcaccctggacagaatcctgggacagaaaaaggacattagatcaaaaccaaaggaacctgaataaagtgtgggctttatcaaataataatgtattaatgttggtttgttaattataacaatgtaacataaatgtaagatattaataatacaagaagctgggtgtggggtatataggagctctttccactatcttcacaatttttcaaaaatgtaaaactattctaaaatttaaaaatttattttgaaaaggaggggggaaacttactatctcagcttaacaaggagtctgaagtaggcaacagcagaactggctgagccagtaaattatattatcaaacactcagactcttctcatctttccctcgtccatccttagcttgttaatgtttgccctcaaacctgtcttctcatgattacaagatggctgccacagttccaagcatcatattgacatgaaaccatgtttaaagacaccaaggaccatttctctttatatgtctctttatcaggaagaaaaatctttttccagaagcccttctggaagatttcctgtaggctccattggccaggattggggcacatacccaatccccagctgcaagagaagccagaagagtgagaaccaggaatctccaacctccacaatgggaagccatcaagaaataatttgggggtggggcaggtaatggtgttgattaggcaaccatcagtgtataccacacatgagttctccccattacacctgagttttctatcagaatttctagcatcaccttctacccattgggctgagttacagataactgaaaatgctggtgtcttcttttttttttctttttctttttttttgttgcccaggctggagtccaatggcacaatcttggctcactgcaacctccacctcccgggttcaagcaattttcctgcttcagcctcccgagtagttgggattacaggtgccaaccaccatgcctggctaatttttgtatttttcatagagacggggtttcgccatgttggtcaggctggtctcgaactcctgacctcaggtgatctccccacctcggcctcccaaagtgctgggattacaggcttgagccaccgtgcccggccttggtctcttcttaagaatctagacagcatcttcactagtcttgctccctccaaatctctctcactctttctgtttcctgtgctttttattcacaatgttaaaaggctctccacttccccttcttgtctgttataccctaaccccttgtgttatatcctaagttcccacactccagccccaaatcttagtcttaaactaaggaaaccttcaggaaaccaaatcaatttttttttttttttgagatggagtcttgctctgtcacccaggctggagtgcagtggcacgatctcggctcactgcaacctccacctccagggttcaagcgattctcctgcctcagtctcctgaatagctgggattacaggcacctgccaccacatccggctaatttttgtatttttagtagagacaggatttcaccgtgtggtccaggctggtcttgaactcctgacctcaggtgatctgtctgttttggcctcccaaagtgctgggattacaggggtgagccaccacacctggccccaaatcaatatctataagagggaaagtagattcaagcaatgcaattctgtgagttaggtttaattattcaggcttcttttattgcaagtgacagaaacacaagtcagattgaacaaagcaaattagctcatataactaggaaggacaagggtaaagcaggctctgggaaaaactggatccaggaattcaaacaaggttgtcagaattcccagtgtcatctctgtctggctttattctctcctgttgcaagctttctacgtgtgaaggggacacaactgccagcagttctggggttacaactttattactttgcagtctatggaggaagagataaattctccctcccagcacctatatactatcccaataaaggtcactaactgggctgatttgggttagaccagtgatgctatccagggaaatggggaaccagtgctaggattagggtggggtgactcaggtacctcagtgcaaagtttaatgaggcagtcattcttgaatgcatttcatgaccccctgagtgagtggctccttacgagtaaggcacctggggcttcaggttcatgcaagagtgtgcacccccttagcttctatgccctagccttctggcttgagcaagaagctcaagccctgtggggaactgtggttggtcagacctatggacaggaaatgacaaggtcctgggattgggcatcagagttacatgaaacaggtattggtggaatagtggttcctctgcggaaacattgaatgatgttacaagaagtgggaaagtatgctgggcagacaaaaataacagaggtccactagaaaagtatctttctgatccccatcttgtaaatgaaaaaaatgggactcagaaagtgacatggattgtccaaagtcacaaagctggtaagtgactgaactgggagctgtaactttcatattaatgcaatagattccaaagctcgtgctcttttccttgcacaacactgtgtgcagtgtatgtgcagggaggatgtcctggaggaggggaatgatgagtttgattagcttttgaccaaaccagctgggatgaaggaaaggggtagcctcagacatgtctatgtgatgaagcatggacagtgcctgttttcctacaggctgtgctatgcgtgacaggatctcttccctctttgccagcttgcagttggtgggggattgtgtgtgataagggttgaggagggaagagaatccttgtgctgcttctgcccacttgtccagtgaccatgtagagggtatctgtccctggccccagcctcaccagtcctggtgtgccatgaagtacttatggcagatggaaattcatctcagcacagcctggtgcagctccagttttagcatgtagctaaagttaaatgtacttaagaatgcaaagaatatcaattttaaaagaatacatttgtaatagtaaaaatggtatacagtagaaaacaaaaatattaaagacaataatacactaatgactcaagtttgggaactgttcacctaagtcttcatgtggctaacagtcacctaactaggttttactcacctcaaatgccctctcttccttatttctgcccctgcccttgcctccctccccattcctgggatcaacagttgtcatccaagataaccctagaagtgacataaggagccagaagttgccacccattttggctccaagcagaacagacatactattctcccaggtgggcatggagttagagtcactgggaaatctgtttccccttgatgacagcagctggcaaatcaccaatgtcagccactggatcctttcctagggtagttgctgtcagtagcctgatgtttgagagtcaggtcagcttctcctaaaatcacagtttcctcagctcagggcccagcccaaatgcccccagtccatggcatgtgattcctagggtgggaatggaggcaacacctggctgggaataaacagaagctgtgctgtgctcagagggtctccattcactcagtcattgaacaaacatgcactgagcatgctggactctgggaatgctgaaatgaacaagatcgtcattgacttgtttactcacacagtcatttattcactcactaggatattctttccttccacagacatttaccatgggcctagacatattgcagttttacagatagctctactcccttggcttcatttagataaacaatgaagtgacaaagtccctgagagatgatgtgatacctcaaattcacacagttctcagtgtatgagctaggatttgaatccagctcaggctgactcaaaataaaattgccactttatacaatattatttccattcctccttccccttcttcctggagtggcttctggagaatgcaaacagatggacagcctcctccacccagcccttcacagctaagttcagaaaagctcctgatctttgaaagccaaagccttcacttgactcctcctgctcctctgtagcagatcaccttttccaaggatgctccaaagatgcacctcacatgctcttttgcaatgtgatcttgaccttgccactgctagtcaagaggtaggtctatgtttctactcccttgaatctgggtgggccctgggactcctttggtggaagccatatctaataaggatgctgtgctctccacttccccttcttctctgttatggattcaggattctttgattgcaagtgacagaattgtcacttcccagcagcccccaggagatcaaggtgtagccctgagctggcctggcagcttttgctcccgactgtcagagtcccaagttgccgtgcaagatgttcagtctactgtgttcaggccgtgtgaaagagttctggggcccagacactgtaagtatagaggctatcaggggtgaccagcccagtcatgcctttaaagggctccagtccctgacattctctgtttgttcccatatgagaaaccccaagtgagaaccacccagccaagcccagtcaacccacagaactgtgaaagataataataaatcattgccttgagtctctgtgctttggggcagtgtgctacccagcaagagataaccaagcacactcatcctgcaacaaggtgagcctgtaatagagaaaagattagaaatatcttgctccctgcacccacccccagtttatggatattttggttttgttttccttccctttaatggagcctaggacaagtcaggtgtggagaaaggaagacatcaatagggtttagaaagcctgaggaggcctcatggggcaggattgccctttgaggccctagtatgggcatttttggcagaaaatttcaggcagagtaggaggtgtcagcactttcctgcattcaaacattgctcctctctttggaatatgctttctatgggagcaaagaattgtctgactttatcaatcaaggcgagcaagtaaattaactgactgaaagttgctatggcataaagttacttcattttctcacatggaaagaggccaggaggtaggtgattctgagaggaaagcagcagtgaacatcttcatcaagcacccaggacttccctgtctttctgctctgtcatcctcagtgtgttggcttttcattcttaggctcatcccaagacagttgctgcagctccaaaggcaagtccctgtgctcaaccatgctcaagacaggatgaaggggcaagaggtcgatgctagaaagagcaccttccacgtctacctcattgtcaggtagcagaagactttccagcagcccccaggagacatccttgcatcacattggtcagaattgcatcacatgattactcccagatgcagaagaggctgggaaaaagagtttcctgcaaaggccattgggacgccttgattgtcctagaccactggccctcagccctggctgtacattacaatcaccggaggggcttctatcttatttttaatttttctcttagagacagggtctctctctgtcatctaggctggaatgcagttgtgcaatcatagctcactgcatcctcaaactcctgggctcaagcgatccttctgcctcagcctcctgagtcgctgggactataggcatgcaccactacacggggctaatttttactttctaaaaaatagatatcaggtctcactatgttgcccaggctggtcttgaactcctggtctcaaacaatcctcccacctcatcctcccaaagtgctgggattacaagcgtgatccaccatacccagccatgaagagctttacaaagatatagatgcctgggccctactctggattaactaaatcagaattaccaggaataggcccaggtgtcactattttttaaaaaaataccccagattattctagtaagtactaggattgagaagcactattttaaaccaatcatgattcagctcttgaagctagagagggacttacatttcctacataccaacctcctcatgatatagatagggaaactgaggctcagagaggagaggggtttacttaatatcacatagccaggtaatatcaggtctccttgatctcaaacagtttctccttccacctggggagcaactacactgtggaaagaggacactatgcaagaaaagtcgtttggccttgctgagaagctgtgattcccaacggcttgtcccaaacttggccccgatctagggtccaagccagtttcctctcaggaggggaaacatccatcttcccggggaagcacagtgcttgcagcctgacacaggactggggccagagggaaactgcgcatgacggctgggatggggtggggtggggtggggagggaacttcagctgctgtgaagaaaaagagctgtcctacattagatctgtgtttgctgcagagcatctgttattgcactgtttgggggaatcaacatcctagaaggaactcggatagccatcacctggagctgagtctccaatctcaattcccaatctcatcccagccctagccatcatcttccctccccagagctaaacagcactctgaacttgggatttttaattctcatgctttttaacaaaaaaattttgtgtgtatccataatatatatatatatatatatatatatatatatatatatatatatatatatatatatatatcatattgcatgctcttacattttctataaaagccatcatactgtatatatcctttggcaactgacttttctctcagcatggtattttttttttttttttttgagacagagtctcactcagtcacccaggctggagtgcagtggcacgatctcagctcactgcaaactccgcctcctaggttcacgccattctcctgcctcagcctcccaagtacctgggactacaggcgcccaccactacacccggctaaattttttgtgtttttagtagagacggggtttcaccgtgttagccaggatggtctcgatctcctgacctcgtgatctacccttcttggcctcccatagtgctgggattacaggcataagccaccgcgcctggcctcagcatggcattttttaaagctttatctgtattggtacatgtaacccagatgatatcatttcagctgttctgcagtggtagttctcaatcttggctgcatgttataatcacatgattttaaacatcctgatgcccaggctgcaccccaaaccacgtacatcaacgtcccagatggacggtactgagtttcagtgttgttgttgttttgtttttgtttttgactcttcaggtgattccaaggtgcagtcaaggctgagaacaaatgaaataaatgataatttgatgatgcattctcctatgattggctacttagtttgtcatgcattacctaaaaatcatgcaataaatatggtagacaaaaatatataaagtatagtaaaacagacacccacatacctaccccacaacttcttaactaacacggtgctaatgaaggcttgaaactcatccctcattcccgatctcacccttttcttcttgacaaaagataatcactaaactaagtttggtgcttattatttccaagcatttctttatactttcactacatgtatacatgcctctggattatataactatacatacatatatggcattgttaaaaattattttaaactttttgtaaatggaatcacactctatttttctaaaacttgcttcaaaaaacatttgtgaaattcatccatgttgttacatgtagctctagctcattaatagtttttctgctgtatgttttcattccattgagttgaaaataaccgattttaagcctatgctgttgttggatattggcagtttaaaaataaatatttcttttaagcatcttgaaatagccatgtaagccagcaatgattacatcagattcattataattctctctttttttgtatatttttgaaaattttcaaaagaacaagtgagagagtaagaatgatcttgatattttcctcctgtgtaatgagtcactgaggtgtggtgtaatgagaaatacatgggtctggagttctgggttaaatcttaattttaacttactagctgtgtgaacacaagttgctttgtttctctgagccttacttccttgtcttaagaattggaataataacagattctaccatttagagttgttatgtgcatgtcatgcttgcaaagaacttagcacagagcctggctatagaaggggctcagcagatgtctatggaatgaatgttagaaatgctagacattagttcccatgaacttggaagttggattgattgatgcaatccctggggcctatgtgaggcctctctgcctagctgcaagaaggtctgggaaagtgagaaattggcattcttagcttttcttgtgggaggttgtcccaacctcataaagagaggggttgctgtgggtagcaaaaaagaaaggccaaaggccacttcacttcactgaacttggcccagttggcttcattctccatggatctcaatttttttaatctgcaaaatggaagaaataattgacggtagtggccgctccggatggcctgccattgctatcatgctggctgcagcagggagatgctcccagtgccataggctcagaggagcctgccggagctggggacaaacaggagccctgccccctccaagttggggcaggagctccccaggcacagctgcagccacccaacttgccgctgcagacccaggccttctgctccatgggcagggatatccatgccgtcctgggggtagctgcagccatccaaactatgactgaagactcaggcatccatgcattcttgggggcctggtaaggccccgtgccctcacaggctcaggagtgcctgctcctgctgcctggcttctctctgctgtcggcagccacttagatctcagagcaaagtctgcctggtaccatgaagacagcaggaagcagatggattcctgggaggaggaggacaggtccctggtaatgcttcaccttcaggccaggcagggcctggagtctgggggccaggctgccagtcctgtggaccagagtggggacttgtggtgccttttctggccctggcatggacactaatggaccaatgcacaggcacttccatccttctgaggtttataaaagccctgggctcagccagagcagggagaggactgagaggaagggatgaccactgcagagaggagctacccactccagagcctcttctctgctgagagctgcagacgtgggaacaaactgcctacagagagtagctatacactgtaggtctcctctgagctgttctaacactcaataaagctcctcttcatcttgctcaccctccacttgtctgcatacctcattcttcctggatgcaagacaagaacttgggcaaaggcaccatgggccacagaggttactggccagaaaagcaacaacccaaagaccccataacataatgactttgtttttattgtgaggttgaacataaatgaattaatgttctaccacatgataaatctaagtggtagaatctgttattatttcattcttaaaacaaggaagtgagactcagagaagcatagcaacttatgttcacatagctaataagatgcttaaaataaagctatagcaatcatcacagtgtgatattgacttaaggatagagaatttgatcaatggaacagaatagagattccagaaataaatctctacatttatggttactttatttgtgacaaatatgtaaaggcaatttaatgaggtttttctcaacaaactgtgtttgatgaatcaggtatccatatataaaaaacaaacaaaaacttagactcttatttatatcatatacaacaattaactcaaaatggagcctggacagaaaattaagagctaaaactgtgaaacttaaatagctgggtgtggtgccacatgtctgtagtcccagctactggggaggctgagtcaggagaatcacttgaggctgggagttcaaggctgtagtgtgctatgatcatgcctgtgaatagccattgaactccagcctgtgcaacatggtgagactgtctttaaaaaaaaaaacttataaaagaaaaatcttcaagaccttaggttaggcaaagatttcttagatgagcagcaatagaacaatctacaagagaaaaaaataatagagtttatcaaaattaacacttctgttctttgaaagacaccaccaagaaaaccaaatgacaagccacagactaggagaaaatatttgcaaataatgtatttgttgaaggattcatatccagaatatgtaaagaacacttaaaactcaaaaataagcaaacaacctaattgaaaattgggtaagtatttgggtagatatttcaccaaagaatagatattaagcacataaaagttgttcatattattagtcattagggaaatgcatatgaaaacatccaccagaattgctataatttaaaagaatgatcatatcgaatgttggcaaagatatggaaaaactggaaccctcacacactgctggtggacatgaaaaatggaacagccgctttggaaaacagtctcacaatttcttaaaaaattaaacatacactttccccactactcagagatttcacacctagatatctatccaagagaaatgaaaacatatgtccacacaaagacttgtatgtgaatgtccacagcagcattattgataatagctccaaatgtccaacaactggtgaatagataaattgtagcatatccatacaatggaatactactcagcactaaaaagagacaatcgactggcacgtgctataacatgaagaaacctcaaaaacattgtgataagtgaaagaatcctgacacaaaagactgcctattgtaggattccatttatatgaaatgtccagaaaaagcaaatctgtagatacagaaagcgatcagtggttgccttgggttgggagtaatggaagaggagaaatggaaataggtataaaagaacattttaggatcatataaatgtccttaaaatggaatgtagtgatggttgcaccacactaaaattcactaaaaattatcaaactgtgtaattacaatggggggattttattatatgttaattatagctcaataaagctgttttaagaatacttataaagtgtgccaataaacaagggtcattcttctccgatcctttccaatgctcactacccccactcttctgggacttgactcagccacgctcggacttaggcatcaggacctgcagctcacacttggaaaagctcagatgcagagcagctgaggaacgtgctgacattgttgccatagccagcaagtgctggcgtggggattggaacccagacttggaactcattttcaggtgaggagtgaggtggggcaacaggggacttcattcacctggttcctttcccccttggccctcctccctaggatggtcccgtggcagccagcagcaggcgcctaacactgctaagtttccaagttcttagacaactcaagatctccaactgggaggccccagggctgactcctctgcccccgacatgggaaattagggctccttccccatctcacttgtttggaagcctaggactcttccttggataggagaaaggttatatttaccactacgactctaggccaaaaccgcaatcctctctgaaccattctcatctgtgaaacgggcatgttgatactcatttgcccaccccagagggttattaggatagaagggggaaggaagagccaccatgcaggggtcccagccctatgttcttctcttcctgtccagagagtaagatcctgagactaagtgtggggttatcagcaggcctggaatcaaccttcactttttctctttccttaggcatggcagccacaggtagtctggtgagaagctcctgaaaggagtcggggcctcagacaagcagtctagcaactcctatgtgctcttttctgtcctttaaaaacaccacatttgtgcagtttcttatgcctggaatgttcattcctcttccattgcatggttggctcctctcgttcttcatgtctcagttcacaggacatctccccagagaggcctttcctggccaccccacctaagattgctccccatcctcttcctattacctatctagacatgaagtgatcttgtttacttatttttttagcttgtttgctgccagtctctcatctagcatgcaagctctctacagagctctctacagagcttgcataaatggtattggaagagcttagcaaggggattgacacaaagtagatgctcaatgaatatttgctgaagaaatgaatcaaatgttagtggaaaccaagtaaggatcggtcgagacgtgcttctcatgattacccagcatggatgaggaaggttcttctatacccactgagggggaagggaacctgaggctcaggaagacctggtgacttcttcaatatcacatagttactaagtggtaggacctggacttagtggaacacagacctttcctactcccagtcttatattctctccagcatatagcggggagaagatgctgttggagccccacccacatcctcttggcaattgcagttctcctacaggcagcaggttactctcctgtaagcccgtgtgactctgcacctgaaagcattttctctctgtcccaaacacagggcaggctggaagtgccaagggagttatagctccaggagcatcctgcagccagtgtgtgaaataataagatacatattggtttataccccctgctcctaacatagagctcctataactcctgtagatatgggtgctaggagaaccttttgttctaatatttggtctttgaccatggatcctgacacaaagctcctgagacctttgtaatttctggggtgataggagagtctgacacagagcttctcaatcccttgaagtttcctgggtaatggaagtatcactggaaagaccaagccatgattagaggctttgaactttcagcaaccctcatcctcctgggatgagagaggggctggggattgagttaataattgatcatgcctatgtgatgaagcctccataaaaatccctgaactacggggcttggggagcttgagttgctgaacacataggggttcctggaggatggcatgctcctagagtgcatggaaccaccatgctccttccctcatactttgccttgtgcatctcatccatctggctgttcattggtgttctttgtaatatcctttctaataagtgagtaagtgtaaataagcatgcccctgagttctctgtaccattacagaaaactatcaaacccgaggagggagtcatgggaaccccaatttatagttggtcagttagaagtgtaggtgacaacctactacttgtgattagcacttgaagtgggggcagtcttgtgggactgatcccttaacccgtgggatcatactcttaccttcaggtcgataatgtcagaattgaattgaattacaggatatgcagttggcgtaggctagagaatggtttggagttgaggaacacccccatatgttttggtcacagaagtgttctgtgctgagtgttggggaataaatacccgggtttcctgcctcactcttgggggacaactctggtacagattctacactaatttgcagaggtgcccagagagactgagcctcagtcacccacagcagctacctgtttgataatgcaacctgtataggcttttcttcctgtcttctctcatttccctactcccctactggtgcttccaggaatcacctcccagttaaactaactgcgcataaattcttgtctcagggttgacttctggggaatctcagctctattgttacctatgcatagcaaatgaccacaaatgtagtggtttaaaacaacatacatttcttatctcagtttctgtgggtcaggagcccagatatggtttagctgagtcttctgctttagggtctctggctggttacaatcaaggcgtcagccaggtaggtctcgagtcctaagtgaagacccaactggggaaggatccacttccaaactcacttagaaggctgttggcagaatacatttctggggcctgccgtttcttctatatgggcctcaccaacatagcattttgctttatcaaagcacgcaagccaagcagaaagcaacagagaaagtttgctagcaagatggaaattatgattacatgtaacttaatcacagaaatgacatcccatcacctttgtcacatttgattagctagaagaaagtcaaggtcctgctccattcaaggagaagggatcacacaagggcatgaataccaggaggtggggatcattggcggctattttagatgtctgtgcaccataccaactaacagacatctaaaaactaaaatcttgaaagtagcccatgtaatttaggagttctatatctgttctaaggaaagcttctgatgtaaacaagaagccatgcacaaagatgttcattacaacattttttataatagcaaaaactagacaccacctaaccatctactaatggggtaactgctaaataactaatgacatatcaattctctttaacaataaaaagtagggccatggcatattgttgaatgaaaaaaacaatttgcagagctatatatatggtatcatgttgtttaaaacgcaacaaacaatattacatatttctgtactctatttacacacacatgtatgtatagaaaaataattgaagagtacctaccaactgacaatcttggttatgattgtggagccaaagaaggcaaactgacttgagtgtggttgtcaaaggggattttacttttatttgagagaccagttaagttcataaaccatggcagctagactacttgggtttaaatcctggctctgcggcttattggctgagtgactttgggcaaaatacttaacctctctgaatctgtttcttctcctctagaagaaggacgataataatgccattgttaaattaattttagcttaaggctgcctccttacatattttaagtttgtcctaaaggtttctccatacatagtgaactacaaccttcctggatgtgtaaacagagtgtaacctactcttgtaccaatcactgtgtttcaaccaaaggtagccaactgttcaaactgtgtgcaaataaggcaaatgccaagctgtaaccaatccagctgtttctgtacctcacgtgtgttttctgtacatctctttcctttttctgtccataaatattatctgacgatgttgcaccccccagagttgctctgaacctattctgcctccagggactatgttctttgctcagttatactctgctaaatttcatttaagtttttaattaaacaagtatttgttgtttatctgaaattcaagttgaactgagtgtcctatattttaatttggcaaaatctaatcctggcaatggaaaggccctgaaggaatttgaggcagaggaataacgtaatctaagatttaataaatacgtttatttataaaattaaaactatgggttactataaatgagtttagaggattttgaggcatataaataagttccaggagcatttcgagaaattcatgatgcaaggtctccatctaacaagtagagcagttggtgcagatgagatgagcctgatcgccaaccagcctggaggaaccatgagctctctctgcactccttgtcttcgcctttgcatggttctttaccggttatccaggcctatcatgcccagtatttccttccatcctgaccacatccctgcgtgggaagtaggtcacatcaatggtaaatatgctgtcgttatgcagatgtagaaaccgaggctcagagaggtgaagtgacttacccaaggtcacacagggaggcggcacaggaccaaggttacaactcaggtctctgcaactccaaagctctttcccttctccctcactgctctcggttcttaaggcatccagcctgtagtctatccatgccggaggcttgcaggcaggtctgggtgtggggacgcaagaaggatcccctaggggcagctgctggccttggtgcctgtcgtgtcttcgctggagccgggcgtgcaggtggcggaccctcctcgcctcctgggctgtgaagaaggaagcggcgatggcatgccgcaggcggcgggcgtaggcctccaggagcaccgtggagcccgccaggagctgcagggcccccgcggccagcggggcagctgcgcggggacgccgggcgggtagcagtgggcagcgggcggaggtgaggcggagctcccattggtaggagctgtggacggagaggaaggggctctccggagccagctggttgaagaggaaagggatgaagcccaggacagtgtatgccaccttgggaaaggagaaaaaggcagggtcaactgagggcctctctggccactccccacctctaggagaggcttgtccagctttccctgccttcatctgcaaaatggttacagaaataacccgtttcccagggtttgaggaggacccaatgagactaggagtctgaaacaggttcttttgccaaataaaaatcaccatacaaatgttactaaggttagtatctttgagcagaatattttagagaaaacaaattgtctatggatgtttgctccttgctgagtccttactgaatactttagatgtcctattccatccaatatacacaattctatgggtcgagcccaggaggagcctaatttaaaagatgggaagtggccaggcgcagtggctcacgcctgtaatcccagcattctgggaggccgaggcgggtggatcacttgaagtcaggagttcgagaccagcttggctaacacggtgaaatcccgtctctactaaaaatacaaaaaattagctgggtgtgttggcacgtgcctgtaatcccagcttctcaggaggctgaggcaggagaatagcttgagcccgagaggggagggtgcagtgagattacaccactgcactccagactgggcaacacagcaagactctgtctcaaaaaaaaaaaaaagatgggaagcccaaagccacacatgggttacatgttgccaactcagggatcagtctcagccaaggtgggtccctatgtcctgcttataagcactgggccctgcagtttccataggtatgtccaggtgaggaagaatggtatctagagaggcagggaagaaagaagttcaccatttgaactttggaaccaacctgggttggattctgcactaacccaggtgcagaaggatagcttgccacaccccaaatggttcaaatgaatgcaggagaaactcccaaagctttcagaaaagatgaaataatgtgaaagcaatgagtgggcctgtacaatttatgctttcccagaggatcagagagtgccagcctcaaaacttgctgagtgagggcccgcagcttgcaagaaaatgctggaaacaatggtggggcatcaccggggctctggaaggcacagagaatgatattggaggaaaagcctcagagactgactcctcggccagagtcattcagaaaagtcagattgaatgttttaggaaaaccatcagattacttcccctccctcccttccttccttcctcccttccttccttcgtccctccctctctctctcattccttccttttttctttcttccttccttcctttctttttctttctttctttctttctttccttctttcttttctttctctctttctctttctttctctctttctctttcctttctttctttctttctttctttcttcgtttcttcctttttttttttttggagtcttgctggctcaggttggagtgcagtggagcaatctcaattcactgcaaactttgcctcccaggttcaagcgattatctcacctcagcctcctgagtagctgggattacaggcacacaccaccatgcctggctaatttttgtattttcagtagagatggggtttcaccatgttgttggccaggctggtcttgaactcctgacctcaggtgatccacccacctcggcctcccaaagtgctgggattatagataggcatgagcctccatgcccagccccctatttttctttttatgtatacgcgagaaagatatggcaaaataaacctatgttaaataataagtgaactattttatacaaatacaataaaaattctaaatgataagaaagcattgtgtcaaggttgaattggtagcattttctgccctaaggatacataaagtaatggtgtgacttgcaattgatgactatctgagatttggtgaaaatgagtaaatcagggaacatgcttagaacattgcctgacacatttctttactgtgacctatggtaagaaatgcattttacaggccaggcatggtggcttatgcctgtaatcccaacactttgggaggctgaggtgagaggaatgcttgagcccaggagtctgagaccagcctgagccacatagtgggacaccatctctaaaaaaaatattaaaaattaactgggtggtggtggtgcatgcctgtagtctcagctacttggaaggcagaggtaggtgaagtgggaggctcgtttgagccaggaggtcaaggttacagtgagctgtgattgcaccactgcaccactgcattctggcatgggcaacagagtgaaaccctgtctcaaaaaaggaaagaaaagaaatgcattttacagtaccttcaaagcagagattgttttgtaattgaagaaaatattcaaaaaccatacactcccttattgcctaagatgtaatcttataattttccagttgattctatttcattaaaaacactatttatgactccttaaattgattaaattgattttgtgcagtctgaaaagcactttcttaatatgtaataagtacttgataaatataaactgttaatattattagctcgaagtttgacactttgatatgttttatgcaatggacttttgtgtgagacctcactactaaaaattaaaaataaaaagatccgtggcaaaagaaaggatcgaaaaacacaactcttgatctgatagtaatatatccgattataagtcgatagtaaatattttctatatcactattaaaatagcaaatatttcaggctttgcaggacatacagtctctgttgcaattactcaactttgcctttgtagggcagccacagacaatatattgacaaatggcatggctgtgttctaaaaaagctttatttacaaaaccaagaagccattggatttgtcctgaaggctatagttggatgcctcctgatcaaggccattccaaagtcctcctccagtctgacatagacagatgtaagctattaataatagccactctttattaaataatctcttatgtgccatggagcttactaggtactttaagacaataccacattgtaagacacaatagccttttaggattaggaggatcgattcaatttgtacaaatgtggaaaatgaggctaggacaagctgccacttgtgaagggtgaccttggatgcaagttattttaaggtgtctgggtttcagcatcctcaactgcaataggaagtgaaaatagaaaccacttcctagagctgttgtgggtatccgatgagtccctctgcccatggtatggggccccatggatgattcaagggctgtttcttggaggcaagtcaaatttcatcacaagtcaagggtttaacagattctccccctgccctcaaaacaatgactcccttcccttttcccatcatcacacttacatcatacttgaccgtgagcgtgatgggcacagttggcaacttctgagcccagtccacagtagcctgtgccaggaggaaggctacatggtctgtggccaccgccacagccgtggccacgaggagcagggcaagcagccccagccttagaagacaactcaacagctcctcctgtgacagcctcagctgagccgcctggagcagccaggtgggtggaggggccaggaggtgtgtagcctgggcctgtgccaaccgctgggtcagctgttgagtggcgtagatattgtcaaaccgcaggtctgtcaggtagcaatggaggtaccatgccgactccaccaggaggcccaacataaacagccctgtgaccactcgctgggtccctagcgctgctgcccgggccagggactccaggccagagaaatcctccaggacctgctgagtgaccctgagcatgtgaaggtagaaggcagagccattgtcctgggcctcaaatgtcaggccccggctgcctgcctggcctgtggggcccagagccctggatgctgcatgcagctggtgagtggtattgaggagactctccagggagccctcggtgacacacctcagcacctgcccggccgcacccacgttggccaggacgttgggcaccacagcaatggccagggtggcagtgctgtaggacaggagcagccggcggccctgctccatacccagggtgggcacgctgagtgcaaacaggcagcggactgggggtaccaggcccaggctcaggaagaccaggaggccacagacagtggcaaccatggctgaaggtccaggaggataaagcagcaaggatgccagccagtgataaaccagacctgcagcagcagcagccagggaggcacacaggaggagctgggtcagcagctggccacagctggctggaacaggctgggagaaggcgtcccaggcagcctgcagtggggcaagggccttccagaaccccaagtgccaggacctccacctgcacacaaggaaattgaagggcatctctatcaggaggtgggtgggtgggtgtctgtccactgcccctgccccacatacccatcaccaggctctgctaacagactccacccttgtagttacccaggtggaccaatcagagtaagtcactgtatacccacgtgacacaagctgaaccaatcagagccttccccaggattactctcgctggaactgtcagggaagagcccaattcccatgcagtacctgaggatgtgaggatgaaagtctgccctgtttgagtccattattacagttttgtgaaggcaactggcccaagagaatgaaagagtcatggagcgagaagcacaggtgaaagagagagaatgagtaagaggagagagaagaagagaaacgatttcacttgaattaatagtcttggtggcttgctgtatgattctggaccttctattctttctgaacttcagggtctcctctataatttaggggtgaggagggtgaactagttggcctgtgagggacttttatattctatcatccttatatttattcattcaacaagtgtttatcaagcaacgactttgtgttaaccattggagaaacaggaatgaaaaaaacagaagtccctaccttcgtggggcttgcactatgttaagagcgatggcagaggagtagtaaggaaagcttggattctgaacacattttgttggcagagtcaacaagatttgcagaggctgattggttgtggggtgtgagagaaagaggggagtcaaggatgacgaggtgcttttgtgtctgagcaactggaagcaccaaggtgtcatttcctgagatgagaactctgtggtcaaaacaggtttgagtggagggggagagaggaggaattcagttcagaactcttaaatttgagattcagttgagccattccgtggagcttttgacgacgtggttggaaatagaagtcaggaattcagaggggaggtcaggctggagttataacattgggagtctgattattagatgtctcccaactttatatccctacctaaagccatgtgcaccatgagattcctcaagagagtgtgtcactggggaggaaagacatccaaggacatgcctcaaggcgctccaaggttaggggctcttagataaggaggaaccagcaaaagagactgagaaaccaatgtggtgcttaggaagccaaataaacaaaatgtttcaaggagaaaggagtgatcaagtacgtcaaatgcagccaacaggtcaagaatgatgaggactgagcaatgcctattagccgcttagaggtcactgttgaccttggcagggagagttcggtggcttttggggccaaaatccaactagactgggtccaggagagacgggaaggagaagaataggaaacacagatacagacaactctttccggtaatttctacactaaaacagcagggagatgaagcagtggctggtagctatgggaaattggaccaagagaattcatgtaaagggaggaaatctatagcatgtttgcaggtgggagatctcatcgagaggggagacattgacaaaggggagactccctggagtgacacctgtaggggtggaggcagagagtgagactgagaacatgcaaggtggggctggtcttagaatagagcaggggtcgttcatccttaatagcaggtgggaaagcagaggaaataggtacagatgatggcgaatgaacaggcagcgtgtatgcacctgtgaaaagtatcctctgatatacgcagagcagagtaatgttaagggcatgacctctggactgcctgggctcaaatttctgctccaccacttgccagctatgtgaacttgggtacatatcacaacctttctgtgtctcagctgtctcatctgtaaaatggtgcaataaaagtatgcacctcctggggtcactttgtttctggcacatggtaagtatcacatcagctattacctaccactagagtcaactccaccggagcagggactttgtccgttttggtcactgatatgtcccaagtgcctacaatagtgtctgccatgttgtgagtgctccaaaactattcattaagagtagcatgaccgattgcttctgtttgctcaggttggcaggaagcaaggtcagcagagaaggtaagatgctggcggaggtgatggatgcttgaagaggaagaagaaagtacaaaatggttgcccaggaaagtgggagaacaaacgaactggggcaataacatatgtgctgggcaacactgaggcccacttgaggttggagatcatacattatcttaagtgagagcaggcagaaaggttatacgggaatatggttataaagggcagggagggtggtggggaggctgtcactgtgttggttacaggcaaagctgctgacttgctccaccatcaacagcttgaaggataagcatgtgactgggtctagttgatccaagtacctctgatcccctggccaccgtgactggtgcagggattgcacctgaccggagatggaccaatagagctttcctcaggattttgctgcaacgacaaaaaaactgccctttgttgccttgagagctaagctggtaggaagatgcctcaagccttggggaccaccatgtagtatgagtcggcctgggatgaaggcaacacaaggaaaacagtgttaggaaacagacagagagtcccagtggccttgttggaggacctggatccagaaatgcctgaagccgaaatctatgccggaccacacactaggagatgtctgtttttctacaggcagtgtaagatcaatctgtcacttgcaactcaatgagtcctgactaatacagaaacctttgtcacagggcttctgggacaataaaatgaaataatccatgtaaagaagtttacacagggtctggcacagaagagggatcctataaaactgcaccacttgttactctgatgatacttatgtcaacgatgtaaatgtttcactcgagtctcctctgtgcccaggctctgtgctgacccctgtggacacaaagatgaattaagtcctggtcccactaaaggagttcacagtctaattgaggagacttaaatagaccattagagtttaagttcattaacaaagaattctgagcatagtatgcctgggcctggactggggtgggatagatggagagtgacccagttttacctgggagtcaggaaggctccctggaagaggtgacattccagctgggggtggaaggacaagtgtcagtttgtgggtgaagaagggagttggacatccctgacagaaggaacagcgtgtgcaaaggtcctgtgctctgaccatcgggaaatagggagttgggagaaccagaacagtgggaagctgagatgcagtgaggcctgtggggctggagtgaaggtcacaaccttgaagccctaaaggctgaatcatatgcaaatgtgccttattgtggcccactctgtgtgtgtgtgtgtgtgtgtaagctgcccccatttggaaataaggaagtttcacattaaaatctgggtttccagcttttcttgagagataagaagatctgggttagagctcccacctttgcaacaggtagctggagctgagtatccactacccacctttgacaggggagcagccctgcagactgcatcctgctgatcaatgaacgggtccgtctgcacacccaggtggccttccacaggtgcaaccccttcccagctcccgaaggcatttgaatttgggactaaacacccccttctactatataattaatatttggaacacagtagcttttggaataatagctaataataaaaacaattttaaggattgaaagccagtcctaagtcatattggatgacaattcctgcacggggtattgaaaatggcaaggaaactagctgctgtttagtgagtgcttcctctgagccaagcaggtgccaagtactaagcatgtgttttctcattcaattctggcaacagtcttgtagatgtcattattacttccatttcacagatggggaactgaggctcacagagaactgaggatttgcctaaggtcacatagccaaggaatggcagagctgaagatttgggttcatatccatcacccccaatggctgactgttttctcacctgtagccctcagtgtccaaagtccccagacctacccggtcttgacaagttgctcagctgctcctgggtggcctggcatgctgtccaaatggcagtggtttcaggcgggcggtcgctggcagctgtggcaggtggagaggaagtgggggaatcgctgggacttgggaatccctgccacttctgcttttccactctttaatgaagctctcctggctgccttgtcccgcccttttcggggcccacctcccagagggttgggcaagctgcctcatcctctgcccacaagcaagagcgggtggaaggtgtgggaagaggaaaagacagccttttccaagcgatgtctctaatcttggtagcaggaaggtagaattagccccattttacagagaaggaaactgaggcacagagaaaccatacagcttccctttccctcccactccatagttgtgtgccccaaggggagcctgatccctgctcttgggactcacaggtgataatcagacccctgccaagtactgggagcagtggctctggtctccttccccagcccccttcctgtctttagcctgacttgtacctcgcttcaaatctcagctctgtccctccctagctatgagaccttgggcaggtgacctcatatctctctgctggttttctccccttaaaaaaagtttaatgaggctgggcacagtggctcacatctgtaatcccagcactctgggaggctgaggggggtggatcacctgaggtcaggagtttgagatcagcctgaccaacatggtgaaaccctgtctctactaaaaatacaaaaattatctggtttgtggtggtgcatacctgtagttccagatactcgggaggctgaggcaggagaatcacttgaacctaggagacaaggttgcagtgagctgagatcacgtcactgcactccagcctgggcacagagcgagactccgtctcaaaaaaaaatagttaatgaaaataacagttaacatttattgagcacttactatgtatcaggcattcttctaaacaatttctcttcaaattcactgaacacttactttgaacatccctttatggtaaagatgttattttcattcttcagctcagaaaactgagactcagagagctacgtcgccaaccacgccactcagctattaatggtactgccgtgatttctaaccagcgggctggcttcagggtataccagttagccactgggctctgctgctgtggaggggataattcacagacctcgtgattacttcatagtacagctggtactgcaaatagtaggtactcaataatgtaaattccccacgcacaccctctgcagttagtgccctgcaggtctgctttcaggctgtcctgaaagccagttcctacctggaatgcagacacctctccagcatctctgtaccccatcactcccagcaggcctcccctgagccccccaggctccccctctgtgggatggaccagtaggggcacagccactttcccttataaggacatgttgcctgggtcactctcaggcctgaaggggaatgtcctgcggcctggataggggaagtgacgttcttatagttacacagcgattgaatggaatacctgtggccagaaccctcagagggcctaacacacttcccagacagtgcacccctgcaggatgttaggccagctaccaggtctgcaaagaactaagtacatgaggcagactagcagcagcaaacttgtgtacccacaggggccacgctgcttagctcatgaacaaagcaggatgaatgcaaatagcagtgagctacaaagtgtagccccccccactccctcctgtctggtcagctgttattcatctccagttgagggtcaaagccccttgaaaacgaggcccaccatgaccagattttccagcttttctaaagacgccagtcattctctttttaatgtaaatgtcagcttttttttttttaaatgaaagactaccatgcagaccaatcttaacaggtctatgggccaaagccagcatgaggagcatcaattttcaccttccgcaggaggccttagtcaggcctgctgttagctgtctggctgcaaggagatgtctagctattccccccaaactgcaggggccctggactggaggcagcagacctgaactcaaatgccagctttaccacttactgtgctgtgtgaccttgggcaagacactgtccctctctgaagttgtgcatcctctgctataatgagggtaatacagtacctactttaaggactgtttgaggattcaatgagataatgcatatagagtgttcagtaaacaataggtaaatgctcatgccctgtttcctcctacctgggatgacagttctgccaagtgagcccctgtctgctcacatctgattgttgagacttctgatgctcaccaggccaccctggcctggatcccatcacatagcaaacttcagggcattgtgctggtcagacagaaagagtcctagaagccagccaccagcatttgcccagtttctgcacaggcactagggagctggttggataaggaccaggcagtttgtttccggaaggcctctggtggatatgtaagatttgggagcatgggggcatagggagtgaacaggcaaaatatatttttggcttttctcggtacatgtaggcagttacctctgtctatataaggctggcctgacctcaaggcccacaacatccggaaggggcttctgaatcatcaaaaatagaatcagctttgttgaggggaatttgtgggtggaggattcagagccataagacagaagaggaagaggaagaggtaagccttcagatcttcctggagagcctggtctgggatcagaatcagagacccatagagtattattttcagtagagatggacttttgccttgttgcccaggatggtctcaaactcctaggctcaagtaatctgcccacctcagcctcccaaagcgctgggattacaggcgtgagctactgtgcccagctgcacagaataattagagtcactgaattctttagccttcttcaacgttgccactgtccagatagtttgagaatacagagaagcagccaaaatcttcctatattgctggtgctatccaatagcaacagtatgtgagccaccaactcgaaccgtatgcataatttaaacttttctggtaaccctactcaaagtccactgattcaaatgttagtctcatctaaaaacaccctcacagaaatatccagaataatgcttgaccaaatatctgggcactatggcccagtcaagttgatatataacattttttaaatttaaaaaatcgaatttttaaaaacagaaatcaattttaataaaatattttagtcaatgtaacatatcacaaatatccttttaacatgtaaataatataaaaaattgacaggatgttttacatttattttctcatattacaattttctacttataacaaatctcaatttgaactagccacattacaaatgttcagtagccacacatagcaagtggctactgtgtcacacagggcagctatagaccatttccatcattacagaaaggtcagtgggtagtgctgctctaggccattagaacccgtgaccgctaatgctgaaatggacctcccagatcatgcaattcaagggtcatagattcaaatgctttcacaagccaggaaagtgacagagttgacagaggagagccagtgtaagtcattaaagagtggtggggactgaggctaattaatgtttacgttccaacttatgatttcctccacatactactcagctccaaacaattgttgccagatgccaaagagggtctcatattgctagatctggtattttcctttccaagagaagcagaaatccagatttttatgtgaaatctcctgaattttaatgactagcaaataataatttaaaattcatcaggggtctggcacagtggctcacgcttgtaatatcagcactttgggaggccgaggcaggtggatcacttgaggctcaggagtctaagatcagcctgggcaaatggaaaaaccccgactctactaaaaatagaaaaattaggtgggcatgatagtgatgttgtgcacttccagctactccagaggctgaggtgggaggatcacctgagcctgggacatggaggttgcagtgagctgagatcacaccaggccagtgcactccagcctgggccacaaagcgagaccctgtctcaaaaaaactaaacttaaaaaaccaaactcattggggagaggacaaacaaaacctggctgagggctggcaccagattgcaagctctgatgtgtcaaccctttgtgccttactcttctcaaagcttgtttctccagacccctccccatgctcctcctccctgccctgcacccgggaggtggacctggacaggctgcatcaaagccctccttgcattctggctggtgttggtgcaacacataaaatttcatgtgtcaacttggctgagccatggtgcccagggatttagctatgcatcactcttgatgtttccgtgagtatgttttgagatgagattaacatttgaataagtgggttttgagtagggtggatcacccttcagaatgtgaatgggtctcatccatcagtgggaggcctgaatattgcaacagactgacccttcctgagcaagaggacgctctgcagcagatagccttcaggttccaactgcagcactttcttggctctccagcctcctggtctccccatcagattttggacttgctaagcctccacaatggtgtgagccaattcctaaaagaaatctttctccttctgtcttgataagacacacacacacacacacacacacacacacacacacacacacacacacacaccctgtttgttggtttctctagggagccctgactccccagaaggagagctgagggatagaggagaggaagagccccctccttcctgcagtcaccaagagccagctgcatccctggacccagatcccatcaggaagcttgctcccttgaggccttgggctgggaggtgctcctctactcttcactccctgatttctcagcactggggtcccacaattttcctgtggtccccctactctctgctgaccttgtaacttgaccttttactaaactctctacaaattagctagtttgtatactttctatttcctcttgagaccccacctacgtgctctcatttctcagatgaaaaaatcgaaatccaaaatagtaggccaggtgcagtggctcgtgcctataatccctgtgctttgggaggcaaaagcaggaggactgcttgaggccaggagtttgagaccagcctaggcaacatagcaagaccctgtctgcgcaaaaaaaattagaaaataagccaggtatggtggtgcacacctgtagtcctttttactcagtaggctaaggtgggaggatcacttgagcccaggagttcaaggttacggtgagctataattgcaccccacactccagcctgggctacagagcaagatccagtctcaaaaaaaaaaatagtaaagagatctgctcaaggtcacacagcatgttagagatggagccaggattccaatgaggcttattgaactccttgtttagtgatttttatttcttctcctttttacgataccatcaccacctctatttctccacctacttgactctatatctgtttggcactcatattggaatatgtctgtgtgtaatctgtcactatgtgtacctgtagttcatcacttctgtgtgttcctgtgttttccttggtggatttcctttatattttatttcaatactctcccggtgatgatcacctaggtggcctcaaacaaccgtggcacaaatatcctttgacactgtctccttaggacccatgaggtagttttctgggtcataggaaatacagataatgaatacccctaattactgccaagatgctggccgggctgacaggatttctgtttccttatatcctaccaggacttattgtccacttttcttatttttcccagtctgattggcatgttgttgaatttattttaatttgcatttccctgcaaattataaacacataggtttgggtatctcttcataatcctgttggccatgtagatatctcttttcaggatgacatttcgtaccttttgtccacttttttcttgggggctatggtaaatggcttccaaacacggcagcccactgtccctggtggatgccgcccctaccatcaagggctggagtctatttccttccccttgaaccaggccagtcctgtgggctactttgaccaatagaatttggcagaattgacgttcttagacttccacatcctgcccttagaggccttttagcttcggtttttgttgctcttgaaggccactatcatgtaaagaggtcaaggatagactcctggagaagctacgtgaagagagaccctgaagtgtcagcggccattgcagaccttccagccctagcaaaactcccagctcacggggcagagacaatgccatccctgcagagctctgtccaaatgcagaaacgtgagccgagaaattgctgtttcaaagttctaagtttgaggatggcttgttatgtggccacaggtaacaaaaacaaggtttggtttggttttgtttgtcttgtcttttctgagttggggtgcttctcatatcttctggacatgagcccttggtgtattccaatgactctgtaccagccctgccatctccttgttcctatgctgccatgagcgtaccgtaatggtgctgccgccttctgcctgcagatctttttcactaagaatggcaaagcccttcaggcttcaaggactgagtaacatccggtcagagcaagctagaatgccttctcaggaaagctgcagagacacctggtaaccagccagaagaggcagactctagatttccaaatgccacaaagttccagctcagagcacccaactaagtgaagcaatctgctcatctgaaactctgcacttgcagtccccttgcctggaatgttctccccagagactccccatcgctcccaccttctcccttcctcccacattgccatgagcatctggctgactccttcaggtctcaatctagtgccacctgctcagagaagtcctctccgtccaccctggctaaagtagcctctgagtcagtttaacatcttggtcattttcttcttagccggcatcatgacacatgacttgtttatgtttctattgcctgtctcccctgccagcttgtaagttccatgtgggcgggacaatgaaccagaacatgacaggttcccaataaatgtttattgaatgaataaatggaagaaggagtgaacaaagtaatgaacaaaacagaccccagatcagaggaagagatggctttcttgttaattctggagcagattcaagcagcaaatatttactgaacacttgctatgtgctggaaattgttctaggaactggagttacagcagtaaaaaaaataacatttgtattttcataaatttatattctagagggagaagaagataataagaaaataagttatacagtgtcctattaaggagaaattatagcagagtaagggggtggagagtaatgagggtgacattttagacaggaggtcagggaagcctctcagggaaggtgacacctgagcagggacttgaataaagtgagtcggggaaccagacatatacttgggagagagtgttctaggcagagggaacagcacatgcgaaggccctgaggcagagtatgtagctggagaggggagggaagagcagtagaaaatcagagaggtcaactctgtggaatccccagcccaggaatttggggctttgaagctctcttatgttcagaaaggcaaatcatctccaggtccaaagttgattaacattctttatttcacagtatttttgatcagaagtcttagaaatcatgattcatctggttacaaatcccatgagtttctctttgaatgaacctcttgcttccagtcccatacaacgcatctcccaccagccccagtgggttgtaactgtgattcaacactgagtgctcacttggaaaggaggtggagctcaacttccaactcagagggcctctcccactgctctcagggaaatgcccatgattcacttatgctgtatcaacaacaagtgcagctgggcgctgccttcccagctggccaagcgctcctaggggaatctccaccctcagaggcttaggaaagggaagtgtgacgagtcagggcccctgggctggtgtcttttccaatactgggctaatgctgggccattccattcagcagacacttcctgagggcctgagctcttcactgggatgccagaatgcttctgcttggaacaaagagggattaacccttgaaggcagacaccacttccagcctcgggctcacggggacgtctcagttttacccatatgcagaaggggacaatcttttgcttgcctgagacattttaccctggccttttacaaggccccaatttatcttttgacttttctctcacccctgacaaatggggcctttgataattaaacatgcttaccacttaaggtggggcatggagagatcaaggccacctgctgggacaagcagcaactgaccgccttgcagccacagaggcctatgggggccacatgtaggagagtcctggctggaggggtcatgagtcaccccatgggagggcaggacccaggcctggcctgaccccagaattatggccaaactgacccagatgaaacaggagaatcctaaatctcttgggtcgagatgtcagctgcggtttctagaacttcccctggtatgctcaggagcccagagaaacagcaaagaggctttgcacagtctcatgtccttggaaagctatctgtccctttccctgtctccaaggattaaaaaagaatctctgactgctggttatcggcaggggtaaaacaactggtgcagaatgggcaccaactaagcaaaatcacacactggttgtgaacagctggaacaactgggttggaacattgcagcccaggaaagtgatctttaaagacaaggtggtctcttcagtgtaatcgaaagtaatcactgggggataatgttagctgtgcccatgggaatgaatggcctcctatcccaactgtacgagacaaacaccatgccagatttgctcactgttgatgacactgggctgtcttgtatcctaatgataaaacagctaactgataaaggagcttatttctcaggcagcagatctgagagatacctgggctttgaactgcatgaaagagagagaaagtatcctagataatggctcatggacttgagtgggccactggaggtcacccttgcttgctgcatattggattacagaaaagaattatttgattgttttgtagtgtcctagcagcaggtgatggtgacagccctttgagagggttcagcctcaagggagtcctccagggggactcagagggtccgaaatgtgtcattggccaaggtgggtggcaatgctgtgacattgaccgagtacatatcagcccagtccgggaaggtgcccagctggaagatggtctgtgcccaggtattcatagccaaactgagcagcaggacacccatcaggttcatcaggaggcctgtccgcacctgaaatagagcccagacagagggaggggtcagcacctgacccaccatacagatggaaacattcagactcagagacaggaagtcactcacccaagatcgcacagccaggaagtgatggagccaggacacagacccaggtcggtaaatgcctgggacccttcaatctttacactaccctaggctgtcactcaaagagctgcaagtgtccccattcattgatggcctctaggttccaggcactgtgtgctacgcagttgtcacagggttatgctgtttaacccagaaagcaaccttacaaaggtcattcttattaatccccattttatagaagagaaaaatgagacctagagaagttgacttgtccaaggtcacctaacttgaaaataatcttgtctgatcactaaacacccccatcccacacacatatacacacacgcatgcacacacacacgcatgcatgtaggaacacacatatgtacacataggtacacacacacacttcaggtccagtccagtcaggtagtcctagtcaagactacccttgtccattgggaagcatttttcttctgtcggtggagaatgtgcccatctgctccctaccctggctggcctcttggaccattcagtccaccttgggctgaaaatccttgttttcccacctgggtcttctggctgccccgccttcacatagcccaggctgaatcacatggtgagacagttacttcctttctaattctctttctgtctattcctcccagagaaagtctctcttaggggtgtgataggaaaataaatcttggggcccccaaattactaagctaaagagaaaagtcaaactgggaactacttagggccaacctgtctcccattctattcagtcatccctctgctcactgagttgaatgcatatctgattgccttctttggaaaggctcatcagagactcaaaataatgcaaccatttgtctcttatatacctatgacctggtagccccctgccctctttgagttgtcccgcctttccggaccaaaccaatgttcatcttacatatgttgattgatgtctcatgcctccctaaaatgtataaaatcaagctgtgctccacccaccttgggtgcatgtcgtcaggacctcctgaagctgtgtcacaggcgtatgtccttaacttaggcaaaataaacttcctaaatttactgagacctgtctcagatttttggggttcacaggggccaccatggcttcagcacttctctgctcctgtcagttgcccttttaacaaggagaggcccagaaccttctccaggcagctgctatcagggagagcttaattcttttgtttttgccgctttgcatttatttttaggtttactggccatggcatatattaataataccggttttccattgatggatgcactggaaacatttcttctggaatattcttattcaagtttttttttgttttttttttttaatgtcaagctgatttagtaaaggtgttaaataaatattaccacggacgggtgggggacatactgcgtgtgctgtcctgcctctcttctaagggcacagaggtggaagccctggcaccttcggaggattagagggagtcgggccgacatgttggggaaactgggggaggattgggtctccctttgccagggctcaaaattcctgctggtcccatgttagctacttcattaacacctaactcattactctcaggagcgaacctgcaggtgggccatccctgcccgggactggctgaccgggggtgccccttgtacccctccacatctcttgcaagtctctacctcttggggactctccatttctctggctgtctttattctccaaatctatgctgtttgcattgctgccctctcagtctttttctctaagtagcctccctgcttccacacttgtccctcccaccctaacgattcactccagccagcagccaaaatgatcttctacagacagaagtgaaatcacatcattgccctgcttaccgagggtccccactgtggtttgaataagataccaagtctgtcctgtccccgctgttccctgacctcgtgtctccaacctcatccttctccaactccactgcagccaccccagcctcctggccctgaatttctggagcactcgctgctattcctctcttccaggcctttgtacctgctgtgccctccattgggactgctcttcccctttttctctgtgaggctggcggcttcccatgatcatcagctcccatgtcaccttcctggagagggcttccctgccacccctctcccccgtcctcttacacttcctcatgttttatttccttctgagcacctagcaatattgaaattttacataatttaggaaaatctgctgaacttgttcacgtctgtctccaccaatagaaagcagcctcctaggaggcggatcggtgtctctcccactctgcagtgcccccagtggctggaacatagaatgcactcagtaaatagtgctgtaatgaacgaacaaatcaatgagtctctgtctcgtctcttctctgtttgctctgtgtctccctttctgcctcgctctcactctcgctctctctccccatgtgtcctgcaggggtcttgtgcctggagggcctgcatcgcgattggttaagcaggtcgcccgtcttggctttgacagctttggaagggttatttgcaaagccagtggagagggaaaaggccgcaggagtcaggagcgggaagggaggagctggttcagcagggaccttccgggggagggaacatattgccaatggctgggccctgctgaaagctggtggggtcctcccactgctacagtcctccgcttctgtctccttcccagctggctgagcactgaggcccacccctgagtcctagggtgtgtctgctgcttctctcccccgaagattctgggcacgaagtggggtccagagggaaggggaagttccttgcctctggagcaaattttggaaagtagtcactaaggcagtgtttcctgagattgtctaagtgcaggaatcatcccagagtctctgctaaatgtatgttcctggtcccactcagaaagatctattcagagactggggagtggggtcagcgtgcaggagtcctgcatagaggccttgcccgcccccttgcggcccacccacatcccggggcctctgctgggaaatgcccagactcaccatgtctttgaccagcaagtgtccagaggcgaaggcgatggagttggggggcgttgagaccgggagcatgaaggcaaaggagcagccgactgtgcccggaatcatcagatacagggggtgcactctcaggcggatggcctgggccaggaaaaggtgggagagacccggagagagaccaacgcagagcgaccacagcaagagggagagagagagagagaggcagttggaaagagggacacaaagacgtagagacagagagacaaagacatccatagagattggcagagtggcagagaacaacagggacaagtgagaagagagagttagagagacagagagagaaaggcagtcagaaagacacatgcacaggcagaaacagagacaagcaggtaagaagagaaccagatcgagagagaggtggagagaacattcccagggttagtgacattcaagggccacactgtggtttgatcagggatgggctggggtggtgtacctagaacactccttctccaatgtgagagtgcagaaaagcacttggagggctggttaaagcccacatggctggccccacctcacccagaattgctgattcagcaagtctggggtgggatccaagaatctgcattcctgacgtgttcccccggtgctgctggtctaaggactgtacactgagaaccagggctttaaaatacttcctctgcctgctccttccctcagccaaacaatctcaacccagagttggcctctggatacctcttgttgggggcatccctggatttcagtgagaaagagagctcatgagagcatctgttggcagctcttccaaatttctaagactgtgtgtatcaaacccccctatgagctggcctcagctagtgggccaccagtttgtcacctctcctgcctacaattcatactgatcacttttatggcgttttacttaaataggatatttttgggccttctagggaatttttgcaacccaaagcatatttattttctcaaaaagctctaaaatcacccccttgcatgtaaaatgttttttgattttgatgataagcaaagtttacaagaatgtgtcatttacaagtgtcttttccagcaaaagctgccccttacagacctggctgggttctatgctccgtctccgtccccataccccctataatactctcatttctctcagtgaccaggtccctctgaggactcccaccccatactgctataaaatggtgagccactttggagggcaatttcctcatctctaacgacattttaaacgtacatgctctttgacccaggaatctcagtcacaggaatttctctagatgtaatcaatgaatgcatagacaaggctcaggtgacacgtcattgttgagtaacagcaaagtctggaaatacctatatttccattgggcagagagattgcttaaataaaccaacaactgtccatttataatggaatattctcccgtcattgaaaaataacacagtgtatatctgtgtgctaacacagataaattgatgcataaaataagcagacagaaaccaaagacaaggtgctgcaggtatgtgtgctggggcatcactgtttgcatacaaagcatttacttgcatcattgatttaattttatcagcgtgggttacattaaggtaattacatggtctggtctttaatctgtttaaatataaaactatattgatagtttcctttttaaaactcctagtataaaagctacctgatcatgtgtatattgttcttttcattctgtcatggtttcattttgctatttgcatttctttttacaggagattgaattatagctttctcttcccttgctctccttacctggttttggggccagggttttgctagctataaattgagtggccatgtctatttttctatgctggtgaacagtttgggtgagttgggaactctctgttccttgcaaatctgctagctctcacccagcaaaccacctggggctggtgattttgtttttgtttttgttttgagacaggatctggatctgggtctgttgcccaggcacctgccactaagcctggctactttttgtattttttgcagagatggggtctcaccatgttgcccaggctagtctgaaactcctgagctcaagcaatctgcctgcttcagcctccaaaagtgctgggattacaggcatgagtggcagagcccggcctggggctggtgatttttagcccaggagtcatcagctgggtagggggaaggatttgttcccctgacggggatatttgggaatgctaggagacatttggattgtcatgatttagggaggcgccacttgtctctagtgagcagagcccagggatgccactacacaccctgtagtgcacggatcagccccatacagagaatgatccagccccaactatcaacagtgttgaaacccctgctttagagggaggctactgctttgcttccattagaatttctcctatggccatttgtttactcagattttctacttcttcttcatccaaaattggtaatttacctgttctagaaaactctccatgtcaccatgggttaattttcccagaagagagaattgggagcactttgaaaatatttactctatgtatacattttttgaaggaaaacatccagtatttaaaaaaattgtactgtggttctgatacgttcatgtattttggaagacagcaatggcaactgtggcccccagtgaaggtcccttggcgggggaagatttctgaatgtgtgttgggggaggggtgctcccctcttccccagaaggaccctcaccagctctgccaggaccggcaggaagatgatgatggtcgccgtgttgctggcaaactcagtgaagaaggcgatgaccacagtgatgagcagcacagccagggcggggggcacattctccagggggtgcagctgcccaccaatccatacagacagccccgattcctgcggagggaaaggcattccttcataccccagcccatccccagctgccgccccccagagagggttaggatagatcacaacaatgacgaccataccccttcccagatggggagactgaggtgcagagaggggaggtgacgtgtccaatgtcacacattcgagccaaggtcacacatctgagccagcagcctctctacttctcgaactgctctccactctatctcatacaggccagggacccaaacccctgggtctccaataatccatttggttctagcacccctaagcaccgatttaagtgggaaagggaaatcaaaccagaccctcagtagtaaaacttctcatccctccagtgaaggttattaattacccaaatcataatagttacttatataaaatattcattatttttataattattatttaataatatattaatatgtatgaaatatatatacaagacttactatatatcatatataaaacacgtatcagatatacatcaactacaacacaatcaatgtaattatcaataataatggtatttatacgcctgtaatcccagcactttgggaggctgaggtaggcggatcacttgaggtcaggagttcgagaccaggccagccaacctggcgaaaccctgcctctactaaaaatgcaaaaatcacatgtgtgcctgtaatcctagctactcgggagactaaggcatgagaatcgcttgaacctgggagggagaggtttcaatgagccaacctcacgccactgcactccagcctgggcgacagaaactctgtctcaaaagctacatatatatatgtatttgtatatatacacacatacagtaataaggataattactacaatgataatactacaaatattaacgttgcattattattcattgtcgtaagaatcaccattattgaggctttacaggggaccaggcacctgcaggcattagctccttgactcctcccaaccatcccaaaaggtaaatattggttcctgttttactgaggaggaacttcagcctgaaaaagtttttgtgacttgcccaggatccctaaaagtagtgcctgagacacccatctacctccataagatgtgtgattctgcaaagctccccgcaaatcagcatcttcctctggacccaccagtctgtcaccttgtctgtaaattaagagcaatgcccagtgctgactccagtcctccagggcagagacgggtagagaagttcaccgagactccactcgcctgtcagtgctgcagaattatttgggtgctctctctgctgacttctccagaagctaccctatttaccagtgtataacatctagaatactcttccgcacctctgtcctctcaccatcaaatgcatccttaaataactgacccaacacatcattataaccacaaaacggcaaagctgaggatgtcaaaatatgctcaatgctgtcccctggtgcaactgtgatgcagcaagatcacaataaagccaccgtttgcttagacctagaacaaagctgtaggttttggagctgatctagggcagagctgggttagtccattaacattcagaatccaatgtattgctaccatagcccttttatcaatccagtataccaaagacactttatatatatatttttacttttaatagaaaagtccctgcttactcagaacttaaaaatttcataatcgattctagaagacagcatacagggccaggcatggtggctcacgcctgtaacccagcacttttagaggccaaggtgggcaggtcgcttgaggtcaggagtgcgagatcagactggctaacatggtgaaaccccatctctactaaaaaaaaatacaaaaattagccaggcgtggtggtgcacgcctgtaatcctagctacccaggaggctgaggcaggataatcacttaaaccagggaagcggaggttgcagtgagctgagatcacgccaccgcactccagtctgggtgacagagagagcgagactccatctcaaaaaaaaaaaaaaaaaaaaaaaaaatagaatagagcatacagtttttacataaataaaatagtacacttgcccctacaatttgacttaaaagttaccttcaatgtaagaataataaatgcttaaaaatatttgtccccagaagagtcctcatgaaactaaggtgtttctggtacacctgcagtttgtctgctagcctggggaatacggtaagtggcagcgtggaggccacagcccctaacctggctgcaaggagtgctgcagggagaaaatgggacctctggtttttcccataggccacagctctggcaaagagtctgacctgacagctctgtgcgcaattaaagggagaggggctagagagagggaatattaatgactcgggcaagtgagaagccaggagctgccccgtagctgggcctctgagtgaccgggcttccagccagcatcctcgcagccacacaggccttggcacagctccagcgctggagggaggtctggcagcttcctaagagaggaaaacgcctgttgcgtagggttctactggggactctaaagggacttcacctgccctttcccattttattttatttatttttttgagacagagcctcacattgtcacccaggctggagtgcagtgacacaattatagctcactgcagcctctatctcctgggttcaagcaagcctcccacctcagtgtcctgagtagctaaggctacaggcacacaacaccatgtttggctaaatttttttaagtgtttttttttgtagagacagggtcttactatgttgcccaggctggtttgaacctctgggcttaagcgatcctcctgcctaggcctcccaaagtgctgggattacagacatgagccaccatgccccagactctttcccatattcttaggaattggaagctttgtttccttggaaacacacagccccacagtattcccagggactccagggaccagcaacagccaaggtcagaggtggcatggccagaaggtgaagagaaggggctctggagtcagactgagtttgcttcccagcttaatcttttctagctgtcacttaacttcctaggcaagtcacttaacctctctgtgctaaaatttccttatctgtaaacgagggataatgatagtgcctgtcccagaaggttattgttgggagaaaaggagtgaatctataaagggcctaggaaagtggctgggcgcttggttagcgcctgccataaccagtagcatgaagtcacaagatgcctgaagtgatggaactcagaaatcacccagcacagtggttgtcaaattatgttccttagtggccttgaagatgaccagaagtacccaaggccaccttgcaaaaatgggaggtggggagatggagttggtacagtgatgtttccctcttcctcctgttttcttacttcaaccaggtcctctcttcttggtgtctttgatatacagtagaggagcatcttataagggggtttgttatggcataagttcaatatttgaagtcaaaaactcctgtggccaaaatacccttgaaaatcttttaaaaggctttgtaaaacacaacgggctcggctgtgtgcatacaactttgtataataattcctaggtaaagagaccagcgaatttgattaaaggaaggaaaaaagacaaggctttatgtacatgtataaacattcaaaccactgcaccatttacaagctgtgtgactttgggcaaattaattaacatctctgttccttgatttctttaagcgattgcagtaaggattaaataagtgcacacgaaacactctctgtacttagtaagcactgaatatgatctatcatttaatttaacaaagcaacatagtgcttactctgtgctgggcactcttctaagtaatttgtaaatattacttaatcttcatagcaacctcatggaatacagactacagatgctccttgacttacagtggagttatgtctcaataagcccatcacgaattgagaatattgaagtagaaaatgcatgtaatacacctaacctacctgttcacatcataacttagcccagcctaccttaaatgcgctcaggacactgacattagcctacatttgggcaaaatcatctggcaatgctatacactgtagaatatctgttgtttacccttataattgctcagcatctacaagagagtgtcccaccacatatcacagcctgggaaaagatcaaaattcaagattctaagtaccctttctattgaatgcatatcactctttcaccattgcaaagttgaaaaatcgtatgtcgaatcgttgtgaagtcaggaaccatctgtacaattatctccattttatggttgaagaaactgaagcataaaaaagctcagtgatttgcccaaataaataatatgacgtgccctagtaagattcagaatctggatcttagtcatgtcattaggcttgtctgtccgataaaatgagggtaataataattgtattagtccattctcgctctgctaataaaaacatacccgggtgtgggtaatttataaaggaaagaggcttaattgactcacaattcagcatggctggggaggccttaggaaacttacaatcatggtggaagtggaagcaaacacgtccttcttcacatggtggcagcaagaagtgccgagcagaagggggaaaagccccttacaaaaaatcatcagatctcttgagaactcactcattgtcacaagaacagcataagggtaaccgcccccacgattaaattacttcccaccaggtcccatgacatgtggggataatgggaactacacaattcaggatgagatttgggtggggacacagccaaactatgtcaataataaagatgacagacttctggcagaaaatgaggaatggggagaatacacattttctccttacctctatcaccgcaacatatttgtaagtaagtttgttgtggcaacagaataagatcaacctttcctcaatgaattaatgcaataataacagtaataataatagtgaagatgagtgtggctcctggtttgagcacccagggtatatcaccactcttctgggtactttccatacattatgttagcaattctcaaagcagcccatcttgtaggtcatagcaacaatgatgtgttaagcaccattacgcacccggtgtcttctaggtgcctagaacagtggtgggtaagacagacatggtctctgcctgccctcatggagcttccattctagtaagagacacaatcaataaacatgcccacaggatcatttggggggtagatgtggtatataggaataggcagggtcatgagaggaagagggactggggtgggaggctattctagatgtgggggcttgggagggcatttctgagggactgagacctgaagagtgaggactcagagctctcaggatgaaaattcaacagagaaagggaagatgcaaaggctgtggggtgcatgtgagtctgatgtggctgaggaaggggccaaggagactggaggggtgttaggagggaagagaggtaggtgccaatgttgagacctacattgtcccatacagctttctgtgttggccaagggaaaccttggacttgactttaagtctatgcagagtcatgactatacggttttgtggcaggagaaaactgtagtgaggaccctaagtgggcttaagtgagttgctgaggctcagagtaagcactacttcctgcccttcagaatgagcgctgggagcccacacacccaggctcaccctggattgcatccagggacctccgatcctcaggaggctgccaggctgtgttctgatgagagtgtggggcaggggccaggaaccaggatgtgccataagcattctggtcgctcctgggccaggctgcggctgcctggggagaggatggtacggcagaggctggggaaaggaacagctactacacaaagcccctgttgaagagaaactccggccagctgcccagggctgggctcagagccagggtggcctctcagcatgcccagcgtcccgcagcccagcctccactgagagccagtgctccccacaccacttctggagcttagggaaacctctggatcagggtcatctcatccagcctccttcctctaggccaggctgggctcagatcactgaggtaaatggcaccatttccaccaagttgctcaagccacgaacctccacatgattcttgattttgattttccttttcctcagtatctaaccataataaccaactgtgctgggctgtgttctcatttctctgcatatattgactcacttaatgatcatggcaactttaccaggtgggtgccgttgtgattccaattttacagatgaggaaactgaggcccagagaggtttagtaacttgacaaagatcatacacctaagaagtgggaaatctgtgattccaatccagatggtctggttccatcgtactgcaagcttcttcaagatctggataacatgccacttccttcaggaagccttccctaagacacccccagcaggaggcaatagcataagtcagatagacatgagttcaaatcttacctctgctactaatgagctgtgttacccagaaccagttacttaacctctctgtgtctcacgattcctaaaatggagacaaataacagtacttttgctcatctattcctttgttccctttgaagtctgtatcgttatttatgtgttttttaattaataaagtaaaacatattttatttaaaaatgagcagctatgtagagagcctgaatgtgccacccagatccccatcagtggagatcttgttgccccagctaagggagtgcagtcggctgtctcagaccccaaaagcggcctcacttgaggtcatacctgcacctggggcagcttgtgtccccagacagatggatgctgggatacaagggcctggctatctctgattactcggactgcctctaaaggtcatctcagctccagtgctcctgtggggctgggactgcctccagctgcatttctccctctgcactctcctgcttccttcctctcccttccacagtgaccccaagggcacaacctaatgaagcccgtgcttccgaatctccatcccagagtctgcttcctgaaagcccaacctgtagaaaccatgacatgaggatttatgagctggtgtacatgcagtttttagcacttcttatcggctatatgtattgggcagttattctttaattttttccaacaaccctgtagagtaagaactttgagcctcaatctatggatgagaaaaataggaacccagagaggttaagaaacctgcctgacgtgtcccagcaaggagtggtagagcctagattgaccaggtactgagattcccaagcctgggcttctgcccagtgtacacagttaacaggcgtccaacattgtaacttcatttgaaactgaaaattaaaattgaattaacaacagaagcagtaaaagaagtaatttcagcttcccttaaccttaatttcagattgactcttaattggctgtggtttttaacgcctcggtttacaaggcgttcaggggtgagacggagctcagccacctgacctttggcttcagatcctggctctaccatctcctggctgtgcaaacgtaggcgagctatttagcctccttttgcctccgattcctcatctttaaaatggagacagtgatagtagctgattcagtggtgtttataaagatcgactgagtcatattcgattcacgaagcacttcaaacaatggctggcatgtgcaaaattctagagtgaacaatttggagcccggactctgaaatcagggagagtttgaaccccagctcccaagcggaatgcaattgtaagaatttaagagagttgcttaatttttcatgtctcagttttcctatctgtaaaagaggcataaaaacattacccaactcttagggctggtgtggcgattcagtgagataatctgtggtgacagatgctggatgctgacgttgcactgcctctgagctgggctggctgacccgcacttgcacgccccggagagtgagcactccctgcaattctgcactccgtgtgcctcatttgccccaccctggtcccagccctgacttctgagctcacaaagccctctggaataacattaataataacatccatgaactaattaatattactatctaggacttatatgagagtggttaagagcatagactctagagccgaactgcctggattctaatcctgactccatagctgtgtgacattaggtaaggtactgtatctctctgtgtctcaagttctttatctagagaatgggcataagaatggtatctaccttctagctttgttgggaggtttagatgagttaacgtgtaaagcatgtttttttctttttcttttttttttttcttagagatgaggtctcgctctgtcacccaggctggagtacagtattatgatcatgactccactgtactccagcctaggaccaccacacctggctaatttttttaaccccatctctacaaaaaaaaaatacaaaagaaaattagctgggcatggggaggcatccctgcagtcccagctacttgggaggctgaggtgagagaattgattaagcccggcaggctgaggctgcagtgagctgtgttggcaccactgcactccaacctgggtgacagagtgaaactctgtctcaaaaaaagagagagaaaaaaagagagagggtctcactatattgcccaggctgatcttggactcctggcctgaagccatccttccacctccacaagcatgttgaacagtgtctggcattgggtgagcgcaatatgttgttatccctctgaagtcacagagccctcgagtcctagtattattagtattagtattatattaatattttgcccatcatgagctccttaaggatccaggccataactcattcctctctttctctgtagcaccaggaatgaactatgatcatctcagtttggcaagtgaggaaactggctgtgcccccagggcccgtgcagctcacctgctctgatcctggtgctgcagccagcactgggacccgcccacacctgcctcccactgttcctgctggttgggggagccagggggtcttacctcacagcctttggccatggcgaagccccctcccaggagaaggatgatgttccagggcactgtctcctgggccttcttccaggtcagcaagggctctgtctctgtgttgggagctgggcagagagagggattcagcacacactcagggccgctcagcctgaggcagaggccaccagccctgagccccatcttaccggggacactcaggggtccccaggaagccaaagtgtggatccagcatttgacttggagctttagggagagagtgcacaggcatcatgataggtggagctgctctattcccagtgaaaataattgtcatggttcccacagcttgggagtttttggaaactccacatgcaggacatcacttaactctcccaacagcccttgggcacaagtgctatttttaccctcatttataagagaaaaggctttctttgtactggaacatgtacagagaggaaagaaaaagaggaaggaaatttagaaaaatagaaacaaagggtatttttgagccccgaaatgatgggatgatttttatttcctcgcaagtggcagcgctgcagtggtgaggacagtgggcgggggagtcaacaaactttctgcagggggttagcgagtgaatcattgaggctttgcaggccacacagtctctgttgtcactactccgtcgttgtagcatgaaaacagccagagaccatacctaaacgtgtgggcatggttgtaaataaaactctatttacaaaagcaggtggtgggttggacctggcacgtggctggtagtgtgacatccctgggttgggggcataggcttggagacagaccttcctcagtcttggcttactgcatgcccttgacaagtgactttgcctccctgagccccatttcctcagccggcacatggcacagttacagaaccggggagtccctgtgaacacgaaccaggacaatgatgcatctgcagggagatgaggcatttccagttagctgatagttgcatccacagggtctagaacagtgcctgacacctgatggtaactccgtaaatatttgtcaaataatgtacatgacacacttagacccatgcctggtgcagggtaatcactcctgaaataggacttttcttggcaggctgtgaccagggaagcagggaggatgggtctgactcctttaaggcagtttaccatctcccaggacacttcctggtcaagcagttatggaaattttgcttctccttttgagctttttccaaacgttacacagtggtctacctaaaacaagattttatagtcaggaaataaagataataaaagctacttaataaaatccttctaccagcaagcatgcagtccacaagtgtatgcagcccacaggtgtatgcaatccacaggtgtatgcagtccacaggtgcatgcagtccacaggtgcatgcaacccacaggtgtatgcagcccgcaggtgtatgaagcccacaggtgtatgcagtctacagacgtatgaagcccacagatgtatgaagcccacaggtgtatgcaacctacaggtgtatgcagcccgcaggtgtatgaagcccacaggtgtatgcagtctacagacgtatgaagcccacaggtgtatgcagcccacagatgtatgaagcccacaggcgtatgcaacctacaggtgtatgcagcccaaagatgtatcagtccacaagtgtatgcagcccacaggtgtatgtagcccacaggtgcatgcagcccatggtatctacatgcaatgcaggtgtcatataccttgaggggattcttgggccaaatgcaacatacacttaagcccagaactggatgaggtaaccagacatggcaggtggcccagccctatgccttcagatgataaaatgtcgtttcattaaagaagtacaagaagtctgaaaaagtgaagcgacttgccccacgcagcaggtaagggtggatgggactggggaaggaagaaagccttgagcagggtcccatgtaatgcagattaaatggcgagtgcgtatcagactgtctgtcacatgccaagtgctcagttaatgttagctaccatgggttttattgttttcccatccaaccatgcctttgctgctatttctcataagcacaatctctgactatgtggatttcccactgcagctcaacctgataccagccgactgtctacagcagtagctgaaggcacaagctttgaactagacttgaatcctagctctgctgtgccccaactgtgtgatttgggccagtgtcactacctttctgagcctcgatttcctcttctgcaaaatgggctaacagcacttccctcggagacttactggaaagaagaaatggtcccactgtgcaaaggactcatcccagggctttgcccagagcaagtccctggctatttatttattttttatttttatttatttattttttttgagatggagtctcgtctctgtcgcccaggctggagtgcagtggtgcgatctcggctcactgcaaactccgcctaattttgtgtatttttttttagtagagacggggtttcaccgtgttctccaggatggtctcgatctcctgacctcatgatccgcccgcctcggcctcccaaagtgctgggattacaggcgtgagccaccacgcccggtcagtccttggctatttatttagcaaatatatattgagtacctgccatgtgtcaaacactcttctgggctctcaggatacagaaatggtcaaaacagagaaaatttgtctccttggagaacttatattccaggggggaagtcaggtgataaacaaataaatatactggccgggcatggtggttcacgcctgtaattccagcactttgggaggacaaggtgggcgggtcacctgaggtcaggagttcaagatcagcctggccaacatggtgaaaccccatctctactgaaaatacaaaaattagccaggcatggtggtgggtgcctataatcccagctacttgggaggttgaggcatgagaatcgcttgaacccgggaggcagaagttgcagtgagctgagattgtgtggctgcactccagcctgggcaacagagcaagaccctgtcttaaaaaataaataaataatgccaagaaatttcatgtgctatgaagaaaaataaaataaggtaaaggaataaagagtaacacaggaagacgcttttctagatggtgtagtgagggaaggtttctcaggaggtggcatttggacagagccctgaatgaagtgatggagtgagtcacgaagatccctagaggaacagctagttggcaaagaggaaagagaagtcgtcgtcgtcgtcatcatcatcatcatcatcatcatcatcaactacttttccaccacaagcacatagtaggtactcaatcaatatttgaatgaccacaaagggtgagaaatgcaagtgcaactcagacccacaaaagaatagtggggtgagtataagaagaaaatcaaggctggcttgaatgcctggttctatgtcctgtctctctctttccctttgtctctttgtctctctctccccctcgatttttcttttttttcttgagacagggtctcactctgttgcccaggctggagtgcagtggcaacatcacagctcactgcaaccttgaactcctcaatcttcctgcctcagcctcccgagtagctggaactacaggtgtgtgccaccacacaggctaatttcttaaatttctggagacaggctcttgttatgtggcccaggctcttcttgaactcctgacctcaagcaatcctcccacctcagccttccaaagtactgggactagaggtgtgagccaccacacctggccctgactctttttaatgagcagggtgaccttaaacaagtcactttctctctatggaaacttactgaccaaaatataagactccacaaaagtctttagtgttaaataccagaaagtatcacatcagccaagtctgcacagggtcactggtggccaaaggacaggcagtgctcatggagttccctccccacccactgggaaatgctggaaactccagttcaaagacccctgggctaagggcacacattggcattccatggaccagacttaacacacatgttttagtgctactgttgttggcccacatagtatttgtttttcaacttgaatgagttgccaatatttaaaaccagggagattccacataaaaatctagatttttggcttcttttgaaaaatcagcaaatctgactaaactagttctgttctcctgcatgggcacaatcagtggaagctaagtaatatccgtcccctttaatttaagtggggattggctcaccaattttccacagaccctgccttgccacgagactgaggcactcatcactacttttttttttttgagacagagtcttactctttcaaccagcctggagtgcagtggcgtgatctcggctcactgcaaccgggttcaagcaattcttctgcctcagcctcccaagtagctggggttacaggtatgtgccaccacaccctgataatttttgtatttttagtagagacagggtttcgccatgttggccaggctgctcttagactcgtgacctcaggtgatccacccacctaagcctcccagagtgctgggattacaggtgtgagccactgcgcccagcctctcaccacttcttactgatctcagctgttgtctccctttgtataataaggaaactgctttctgtttcaaaaatgggaaaggaaagattcacaaggagggccatgtgtttcttgagacacatattcctgtacccaatctgctgtatacaaatgttaccttccatctggagaaaaatataggtcaaatatatataaatatatataatatataaaatagattatatatttataaaacatataaatatatacaatatataaaataagtgttacctccttgtaggcagttgagttacaaactcaattgtaacccctgatctataaagccagtaaaagccagaggtggaaggcatctaagggactccctcattttctaagtgagaaagtaaggctcagacaatataggaccttccctgaggtcacccagaaaattagtagcagagctgagatgccagtcatctatgtcatagtgaggtaggaggcaggactcactccagggttggggcttgggaaccagaccaaattgaggaccagctaaaacaggtcctgggcggaagcagctttccataagacacacccaccagtataccatgtcaatctaccattgccatggcaacacccagaagttaccatcccttttcatggcaatgattcaacaacctaaaagttaacacccttatcctagaaatttctgcataaactaccccttaatttgcatataattaaaagtgcatataaatatgactgcagcactgcctctgagctactactctgggcacactgcctatggggtagccccactccacaagaagcagaacctctgctgctgctgtgcactgctgtgtcaataaaagttgctgtctaaaaccactggcttgccctggaattccttcctgggtgaagaagccaagaaccctcccagactaagccccaatttgggggctcgcctgccctgcaacaatagcgccttccccatgggcccagctgagagaaagccctgggcattgtgagttcaaccccaggtgccagaaccatggatgggcacctgaccaagggcagctgatccataggcaggccagggatctacgaggctgtgaagtagccttgtggaaggagatctgcccaagaagaacaagctggaccaacccgactcttactctcagatgcagcaatgggaaacagagacccactgggcaaagagaagtgacacctgaaggtgaaagaatgaacagagaggctgtatgacacacaggggcatgactgggctgaagttgggtgaggaagcagaagccaggaggaaacagatactgtgaggacacaaaggctccagggaagcagaggctcaaggcatcagatgggcaccatgaggaagtggctgccaccagggggaagaagctaggaaggagcagaaagtatgaggggcgatgccacagggaatagaaaacatgaggaagtggagttggcagaagccacggggatcagacactataagggaacaaaagtagagactaaaatgaagcagaaactataaaggtgcaaaacctaataagcagcagaaaccaggaaaaggttaagaaattgtatacagagggaatgatgagaacagccatttggaagactgactggaaaagaagcagagatggagaaaaactgaatcctgttcaactgcagagtacgcaggcccacagctaagcctccttagacccagttccagcctccctgaggtccagctatgctacaggaactgtctatgggtcgcacatggtggctcatacctgtagtcccaacatttcagaaggcagagacgggagggtcacttgaggctaggagttcaagaccagcctgggtaatgtagcaagacccctgttcctacaaaaaaaatttttttgagacagggtttcactctgtcacccaggctggagtgcagtgggtgccatcacagctcactgcagctttgacctgccaggctcaattcacccacctcagccttccaagtagctgggactaccaggaatgcctcaccacgcccagctattttttttattttttaattttttgtagagatggggtttctccatgttgccaggctggtctcaaactcctggactcaagcaatccacccgcctcagcctcccaaagtgctgggattacaggtgtgagctaccatgcccagcctgctacaatttttttttttttttaaattagccaagcgaggtggctcacacctgtaatcccagcttcttgggagtctgaggtgggaggttcactggagcccaagagttcgagactgcgctgagctgtgatggtgctactgcaccccagcctgggtgacagagtgagaccccattaaaaaaaaaagaagaagaagaaagaaagaactgtttatggagcttgcaaaatcctcatcttcctacaggacacatacactatactccccacactcaaaccctgactcttccatggctggggctatcctgagtgacactatttttctcaacaatagaaaatagtttgattatagtccctatttcctgactccggaggagctcatccaactgacccaggtggcagcctcaggtgttggcgtcaccttctggtagacatctgctggacaccggagggagtcgcaagctggcaatctgaaggccacagtctacaacattttggttagaggtactcagtgattttttaaaaatggaatctgaatgcctttaggcagtttttcctcagtccccaacacttcctatacggttgaaacccagcttgtgttttccatgtgtggctccctgggcaaccaaggtgcaactcctgctttgggccaaggggtcatttttctgcaaaggacaagaaaaataaacattttttgcttttgtgggccaagaggcaaaattgaggctattgtgtaggtacttatataactaaagaaaataaatttccacaaattccttaggggaaagcaaaatttgatacatggacactgaaatttagatttcatgtaactttcacatgtagtaaaatgtttttcttttggtttttttttcaaccatttaaaaatctgaaaactgtgcttagctcacaggctgttcaaaaacagatagcaggctggatttggtctgaagactgtagttgctaacccctgtcctggactaccacctggggcagccctcagtccccagacaaggcaatggctcagacagtgaaaggagaagcaggaaggaccacgtggttagtgcagtggggggctccaggcccttgatgaccacactccatgccgcagtcctcactgagcccaccgagaccccagccttgaccaccttacctttgaagtcaaaccaccacttgagagagggcctttgggacgggaagaagaacaagatggtgacaatagccacgccggtgacagcatcagaaagaaacctacaatgagaaggccccaaatcacgtgaccatgggcatctcagcgggccgaggtttggcagaattgtaaaggaggatttgtggaagggaattaggcctgctgtgaaggggccattgttggaggctgggccactggattctgtccttcagtgcgctcagcatggtgcaaagctcttcattcacagctccctgggggcatttagatgctgcttgggctcaagcaaatgcttatcttcccaactcaaggaccctacgaagagggacttgaccaaagaggggagaatccgagggccgcagaatattggagtccttggaacccctataaatcaccctcaccgggactcctgtaagagccctgtctttgttcagcttgtgcttgaatccctcctgggatgggcagctcactgcattgagatacagcccactcacaccagtggaacccagattgacccagcctcttggcccctcaaaacctaactgtcacgtttcaagcatccacaatgtgtcctttaggggagttttgcgcacattaagccctcggggcaggcactttccatttcaggtggagaatcagagggtcaaagagcagaaacaacttgttcaagggcagaccctgagcaagtcattttgttaaactgacatacaaatacaaccaagataccctgtaaattgtatttttaaagtttttatttgcagcattggacacaattcaataaggaattggttaaataaattgaagtgctcccattctgtagaccctggcctgaaactcagattgttctggctccaagttcaacaaagcctagagctcactgctaaccaaagctctttccactcacacatttggaaaggagagtattcaaacagacaagaagttggaagagatggtcaatatcactatcatcagagaaatgcagatcaaaacactaatggtataccattcatttgccaacaggcaagacttgaaaaggagagtaaaactggtgagggtgttgggaacatatgcccttagtgaaagaataaaccagtttaacctcctggggcatttggcaacatgtttccaattttacatgtaaataccctttgatccagttatcctccttctaggaatttaaccttgagaaacagtcgtacttttgtacacagattatgtgcaacgatgttcattactgataagagtaaaaaaaaattggaagatttttgatagacacatgtttaaagaaattgtgttccattcatattatgaagtacactgcatctgtttaaaaaaagataaaagataacgtcaatctatgtattgacatagaaacacaaccaagacaccctgtaaattttattttgaaagttttgatttgaagcattgaacacaatccaataaggaattggttaaataaatcaaagtgctcccattctgtagagtactatgcagtgttttaaaagaataaatttgtgacctgagtccaagaaaataaaattaaaaaaaaagaatggagtaagtccaaatggcaagttgtccatgatcatattattatattttacagtcttttgttatatgtatacatatttgtatgtgtgtatgtatgaagatatgtgtgcgtatctggaatgtcatacaccaaactgctcatggtgatgatctctgggcagtgggacataaagtggataaagagccactaacttttcctttttcaattcagcattgtttgaatttttatgagtatgcataacttttgaaattcaatacaaaattaaaaagcggattacaaataatatgttgacgtgatcacatttctgttaaaaaaatcttcttttaatagggttctaaaagccaattggcatatgtttcattgaggtataattaacatgcaataaaatgcacccattttaagggtatagtttaacaagtcttgacaaatgtatgcagtccgataacagcgtgatcacaatgtagaacagttctcagataggcattgtttaaaagtcaggaaagatgtatatcagaattagagactgagatttagctgatcttcacattttctgtattgttgaaatgcttataatgcccattttgcatctgaaaaaaataaagcatctacattttagaaaaataaaaaaatggtaagagcaacaagagcttcatggcttcatgaaattatattgtttcttgcttataacaaccttcaggagatcagaatttatgtcacccattttaccagggaagaggttgaggcccagaaggtgagatatctggattgtgcactgcccagtatggtagccacaagccacatgtgggctagtgggcacttgaaatgtggcaagaccaaactgacatgtgctttaaatgtaaagcacacaccagattttgatgatttcacatgaaaaaaagaatgcaaaatatctcactaataatttatacataaaatatattattcatattagtttcatctgtttttcacttttttaatatagctaccaaaaaatttaaaatacatatgtggctcacattatatctctcttggatggggctaactgaaataatcagatttcaccaaatccagcagatacatctctatttaatcatgttcccactcacaccagaatttgacacagtgcccactcacgcttcttaaaacactcccctctcttggcttttgctggtccatagctctaagttttccttctacctcactcaccatctctctgtttctctggtaaattcattttcctttccccagctcccaagtgctggggttcctcatggtctatactctacttaaacactttccatagctgagcccattgattcctacggatttaactcccaaatttatacaatgactcccagatttatgtctgcaacctaaacatctcctctaagctccagtcttgcatatctaactgcctattgagcttgacaagtctaaaccaagtccaaaatagaattatgaataagccattcccagccccctaaaaaatattcttctccaattaaccaccatccatgcaggtactcctttcattcacaccccccaatccaacccagcacaagtcccacatttaactttgaatgatatcttgactgctacattgccattgctaccaccctcactcaagccatcccccagaccaggggtcagcaaatgtctcctgtaaaaagccacacagtaagtattttggctttgcaggccacatggtgtttgtctggactcacatttgacattggagtatgaaagcagccatagacaatatgtaattgaataggtgtggctgtgtgtcaataaaactttatttgcagacactgaaatttgaatttcatataattttcgtgtattacaagacgttgtcttttgatttttccgcagccatttaaaaaatgtaaaaatcattcaaaatcaaatggcgggccagatttggcccaaaaagacacgggccatctagatgatgttatagctcctaactattctcctcgtctatatttttgcccccactacccatttcctaatgaatatagctaacaactattgagttctttttatgagccattttaatcacttgacatgtattaactcatttacctttacaacaagtcaatgaaaaacgtactagtataatatcattttacagattaggaaactgaggcacagagaggttgagtaccttacaaccctccaatggctgcccactgctcacagaaaaaaaacaaaccaaaatgcataacatgcccgaaaagacactctgatctggccctcccctacctttcctcacccgctttccttccttcccaccaggcctcgctcccactgggcttttctcattttctcaaacatgctacgtttgttctgactcaggcttcagtagacattcccagggcatctccactgctttcatctgcagtcttcctaagctttggctcttcccagaactgtccaaagtcaatgcccctgctctattattttatagcataaccctctcagtctttccttcatagcactcattgcaatgcagttgttttgttgtctaactacttgcttttgtctgtgtcccagcatccagcatccagcttagcacataataggttctcaatcaatgttgattgaatgaatgaacgatttgctcagtcacacagctcgtaagtggcagagctagaattctaacccagtttagtctgactccaaatccagagctcccaacacatgagaagtcatattttatcacccaaacctaaactcttttgagagtgaaagagggacctattaataatcatatgggacaaaagatggaaacttggatgcgtgtctccccagctgcactgccgcctctccagctccaggtggcccagcccagaatcctccctgttggactcctccctgtgggtccccagagtctcacccaggattgaagaggctggcccagccagggatgaacttcgggtcccgggtgaagaggaggatggcaaacatgcagaaaaggatgaaaacagcctgttcggcaaacctgtggcacagacatgcaggcatgatggtgaccccgggtttcaggcagaccgcagcaggcacaggctcaggcagctgcccactgggagtgactgggcccgggctctgcctctgagaaagctgaagtcatccactccccagggagtgcccagagtgaggggaggggtgccaatggactgtaaatgattcctgtcctaggacttccacgatccctcaggatccttcctgagcctcaagccaccccctccccgaaatcgcgtgtttcattatcaccaggagtttaccagggtcctacggaaaatcaagaaagtgagaaacagagacagagtccgaaaagcagagaggaagagaaacagacagaaatgcagtaggcaaagagaaagaggagcattcatacagagagagagagagacagaaaaacacacagtctgtctacaccgaaaggagaagacacagagaggggacagacctggagagagggtggatgaaggtggaaagagaggatccccaagagttggaggagacagttacccaatgtacccatttcacagactggagagcagggcccagagagggttagtgccatgaccaaagccacacaggacatgagtggcacagctggtccttgaacacaggcctactgaacccgttattttcaccatatggaaatgtgcattaaacaaggtcccggaagtcacctgagatagtgtcaggtattctgcgtaccgggagggaaacggtgccttgggtggaaggtagcagatcccactgtaagtacactctgaggggctttttggtcctcaggtttctaccccagcaccacggcaagaggttgactgtgtaaaccacctcccatcctccatctctaggctcccacgccacgggtcctggaattcccctggagctcagcccccatgggcccaaggccaggccaggaggaagctctcctgagcgtttaatactcagctctttccttaacccaagggcccccacatacttgatgggccccaggttctggtattcttcccgaattacagctcgagccctatcttctgcattggttcttatctcagatttattcttcctccagcccctgaaacagaaagtgggagattaggagtggccactgcaggtataactaacttctcacctacaacaagcaccaccacctgaccaagccacatcctctctgtccgggaggctgcaactgcctgatagcttgtctccctgcaactgtcttcctttgctacagttgttctccccacgtatagcctggttgatctttgaaaatgtgaatctgatgatatgacttccaggcttaaaatccatgagtgggtcaaacaggcacatgaataaacacaggaatcaatggaacaaaacagaaagtctagacacagactcaatcacaaatgggaatttagtctataataaaattgctatctcagattggtgtggaaaagatgggctattcagtaaatggtatcagacatatagatcaatggaacagagttgagagcccagaaataaacccatccatctatggccagttgatttttgacaggcgtaccaagactgaatagtgggggaaggaatagcctttcaacaaatggtgctaggaaaactggacagccatgtggaaaagaatgaatctggacccctacctcacaccaaatacaaaattaaacccaaaatggattgaagacctaaatgttagagctaaagccataacactctcagaagaaaaggcaggggtaaattttcatgtgccttggaataatatggttagagttaaaaccataaacctctcagaagaaagggcagtggtaaattttcatgcccttggaataggcaacagtttcttcaatattacgtcaaaaacacaagccatcaaagatagataaatttgacttcatcaaaatagtaaaatgttgtgtgtccataaatggtgttaggacactgggtgaccatttgggacaaaaaaaagtgaagttgaatccaaacttcacactgtaccataaggatgaactccaaatagattagaggtttaaatgtaaaaaaaaataataatactagaagaaaacatatgattattcttttataagtcctgtattaggaaaacctttctaaactgtaactgaaatttcagaaaccatatgagaaaagattgaaaaaaaaattaaaacaattctgcagggagaaaagcaccataagcaaagccaaaagacaaatcaggaaaaaaaatgtagcttctattgtagaataagcactcatctttctaaaatataaagcataccagaaactagtaagaacaagaccaaaaacccatttgaaaaaaatgtataaaaatatgaacacacagtttcacaattcacaggaaagaaaatacctatgaacaaacttttcatatgcttccaaacctatgaaaagttgcccaaaattactgttcataaaataaacacaagttatttttctcttatcagattggcaaaaatccactttgctgcaaggaagcagacactctcatacattgttcatgggagaggaaacatgtacgatttttatgaagaatgatttgataatatctattaaaataaaaatgtgtttattctctgatccagaaatcccacttctggaaatgtatcttataaaaatgcttgcttcctttgagctacagctgcaaggtaaaagagaaaaaaataataaaataaaaattaaaaaacagctgggcttgggtggctcatgcctgtaatcccagctgtttggggggccgaggtgggtggatcacttgaggtttgagaccagcctggccaacagagtaaacccctctctctaccaaaaaaaaaaaaaggcacaaaaaattagctgggcaaggtggcaagagcctgtagtcccagctactctggaggctgaggcaggagaatggcctgaacctgggaggtggaggttgcactccgacatggtgccactgcactccagcctgggtgacagaatgagactttgtctaaataaataaataaataaataaataaataaacaaacaaacaaaaatctgtcacggaggccagtcactagaaaaagatatctatgtctgctcatatttgcttaagaaaactctggaaggttacacaagaaaccaataaaagtggatgcttgtttgggaggatatcgtggcagaagaggcccatggttgggaagaggggttctcactgcatacctcttagcgctgttttgatttttgagaagcatatgtatgtattgcctatccaaattaaggtagccatattaaaaagtaattgaagtaagcaaaataaatataggaaaacaaagtgccagtattatattttggctagttatcatttctggctcaagtctctgggtctgaagcttgctctttcttcgtttagaggttgatttggaaatgttagatattaaggtttctttagcacccaactgagactttctcctcaacgtaagtagactgagtgatgagagttgataaagacatatttcccataatatgatttggtgttatttagtattttgtcctcatgccaccccaaattatcttctgtatcagggccccataaaatgggaaatcgtgcactcccctcttctctggtcaagagtgtttaccttatttaaagacaatactattaataattatgaataatatgtgacatcaacagagggtctgtgtgtggcaggcaggtcacacctctcacttaatcctcacatccctgggaggtcaagaaatgaggatatggctagcacggtggctcacacctataaccccagagctttgagaggccaagacaagaaggatcacttgaggccagaagtttgagacaagcctgggcaatatagtgagactctgtctctacaaaaaattaaaaaaaaaaatttaaccaggcacagtggcacttgcctgtagtctcagctacttgggaggctgaggccagaggaacactgaacctgggagattgaggctgcaatgtgctatgatcgcaccactgcactccagcctgggcagcagagcaagaccctgtctgtaaaactaaatgcatacatacatacatacatacatacatatatacatacctacatacatacatacataaaagaaagaaatgagaatacaacatgaaataacaatcatcctcagttttcataggcagatactgaggttagaaacgccattccctgcttccccactctattgccaaaaagaaaatgagaggtacctgaagctcagtcccccgtacaggaaggagatccagagccagcctgccaacaggaacaacagcataagagggaaggcgaaaatgaaccaggagccgaaattcaccacgtcacactgcggaaagaaactggagaacagcgggagatgagaacaggccaagggcagccatgcccattttgggagtgggagaggggaccaggcagtactagtagcagcggggaggaggaatgagagggtcccatggaagtcttgggaacagtgttttccaccaattctaatagaagcacccttttttcctcttctttggaggctgctggcttctgacctagtgggaccaatgggtgccctacagtcaaaatctctgccccctggaggccagacaggtacctgagtgagtgaaacaggccaggctgggccatggtgaattgaagagagccctgctcattaaagggctcagctgctatttgcttccccatggttgccatgcaagagtgcagggccagtaagcccaggtttgggttttacttgaaattatgtgatgtttaaatgttgacaattcatgaaaatgttttaatgaatgtgggagtcacatataacacatctgcaggctgaaacctttgccctccttattacatatgctcaaagaccctgggcattttgtccaggcaatggtgatgtcgatgagttctttctctgctgaacggtgtccaatctcagttttattaagacatcatcaagcctgaaaagatgaagggcaataacactcagtgctggtgaagatgtggaaaaacaggcagattcttgatgtttgttcgtcagaatattcttttctggagaggaatttggtaaaatgcagtaagagtcttaaaaatgtgcatatccttttacccagaaattctactactagaaataaactttaaaaaaacaaccagaaatgtggtcaggaatataagtgctagattgaaaagaggaaaagtaagttatagaatgatgtatacaaaagtatgtggatactcacggacatttctaggtaaataataaaccaaaaccttaacagttattgtataacaaataagcaaacaaaaatattaataaactctatatagtgggattctaagaggtttttatttcctcctttttctctacctgtattttctacaatgaataagtatacctctataattagacaaaataaaaatattgttttaaaaatattaaaatatcagcaagtgtgtggtcagttacataatttgtaatagcaaaataataattattataaaatgaaaacaatcaatgcttatgattaaagcatgtacacccaaaataagacaatacatagtcactaaaaattatgttttctaaaaaattttaataataaaatcagactataaaactgtattaagagcatagtggcaaaaacgttaaatatatacacatttaatatatggacatagaaaagtctagaagaaagtctgttaaaatatcgacagtgggattggaggtatttcaaacttctttttctacattttccaaatgttctttagtgtgccaatatcattttataatcagaataaaccaataaaatgtattttggcaacaagggccaaaggaccactcagggcaatcacttctcctctccccaggcttctcctgttctcagctggagaatcaaaatcacatattacctagcattccttttaaatcccctcttcctacaccagagggtctgcatttgagcccttgtgttgcataagatttgcatgaaatttacttgaaatcccacatttgatatttttactgtatatatgttaatattatatattttatgtattatatgttaatataatatatattacatacttaaacatacataagatatattttagaaaatataaatatgaaatagacatataaaaaatataatttccccaatttcatttcaggttggaacaaagtcctactcacatcagggcaggcaggcagcctgtaaacgctttgacaacaactgctcccctccaattctctccatccccaacctaggctctgctctccatccccagagcccacatcttcctgtccagccctggggatgggtcctggcaaaccctcataccaaatgcctaccttcccccttggcagaacgctaaagggctgagcctagatcctccccacacctgaagcaggaccatctttgcttctggtttttctgtcactgagctaaaaccagaaggcacagccagccttgtttaaaggatagtgataaaaagacatctaaggtttgcagtaaaactcagtgggcttaaatcaattggtgaaatacacccacaacttcttttttttttttttcacctctcccagtgcatggttgacaatcactggtttccatcatcaaatcttaaaatcaaagcattttggaagctgagaatgtattggcaattcatctcactcaggggttaaggttttaaaatcagcacatgtggccaaacatgggtgtactaaaatctcttgtgaaaatacctataatgactcacatgtatgttactgagggttgcacacatagcaaacctctctcggggagatcagcagggcctccctttattcatccccacaggtttttgattctttggttggccaacaggtaaagaagtcagctagtatttgcagccacgttgaatatcaaatactatttggtgtcctttgttggccaaatgcttacatttgcatttatgtaaatcaaatgaacctatgctacatctccactgcaaggaatcttagaaaccctgcctcggaatcctggaacctaaaagtcttaaagacagaatcttgaaatactgaagttttaaaagcttagaaaccagaggtttagaataatgggagcggcacgttgtgcagttggaacatcttttcttttctcttttctcttttcttttcttttttttagagcaggagtgaaagtttattaaaaagttataaagcaggaacatctttcttttatcctcgtgccctgaccggccacccagtcactgctgaccacttccaggggtggggagactttagctcccagcagagcccactccactgggggaccctgcttatggttggaaggcttctcttgggccatgacggccacagacccatgcctcccgctggatcactcctctgctgtgacctttccaatgacccccatctcacttggaggaaaagctggagtccttagacaacacttaccgctataaccttttgtcttctcaccttcccttcgccccaggctcttcgtctccctggttttcttgctggtccctgaacctccccaggaacagctccacctccaagccctgtaggagctactccccactgtcggcaatgcctttccctcctgtgtccacatggctcattcccttctaggtctctgctcaaatgtcagcccatcagagagaacgggtgtccttgaccaacctacataaactagcaccccactctcctcacttctaccctctttccctgctgtatttttttcctaacttatcacacagatatattttatattcatttgctttttcacttattgcctgtctctcccgccagaatggaagttccccaagggcagggatctcactggattttgtgcattgctgtgttcccagagcctggcccagagaaggccctcaatacacattccctggatgttgaatgaaggagggaagaggaggggaggagcagaaccctccccgccggtggggactctcgctttcacctcttgagctggccaagcaggatgaggttaggggctgtgcccgtgagtgtggctgtgcccccaatactggctgagtaggggatggagatgaggaagcccttccagatgttccgacgatattcatcctccttcctggagtcagccggcagatccagtggaacctctgtctccccagggtggtctttgctttaaacaaatccaaagagaagccattcagaatacatggagaacaggccacagactgcctgggagttggggagctaagtgatctttctagaaggtaatttggcacaggtatcaaaaacccgtaacaaggtgcaactcttcagctcagatgttctactctaagaatgtatcctaaaggaatagacaagtgtctcaggtgtgggtacaagggaattcaccatgccattaaatataatttaaatgaaggacagtctaaatgcccatcaaaaaggggctgataataaagatgactctcttcctgaatggaacaccaatgcagctattaaatggatgcttactaagatgagagctgtccagtcataaactatagtgaaaaggcatgtcacagtactatttagttttttattttataaatacttatgttgcagctgggcgtggtggctcactcctgtaactccaacactttgggagaccaaggcaaaaggattgcttgaggaaaggagtttgagaccagcctgggcaatatagtgagatcccatctctataaaaaaaatttaaaaatcagctgggcatggtggcacgcacctatagtcccagctactcgggaggctgaggcaggagggttgattgagcccaaaagtttgaggctgtagtgaactttgattgccccactgccctccagcctgggtgacagagtgagaccctgtctctaaaaaaaattaataagtaataaataaaaataaagaaatggctatgtttcatgaatataagaatatttaaagtctagaaatatatgcaagttgttttgatacctttcccaggagtggaattacatattattttccttttttattttctgggttgtttttcttgtacagttaaagagttttgggaaataatgaaattaagaattactaagtacataagtaaaagatcataatgttggcattattgagatgaaatgatgtccgctattctccattaaataaaataggtatttggaaacagactgaaatgaagaaaaaaatgtgaaatagcaggttacaaaacagcgtacatagaattatcaatttatgttttattttattatttatttttatttttcatttttgagacagagcttcactcttgtcacccaggctagagtgcaatggcatgatctcggctcactgctacctctgcctcccgggttcaagcgattctcctgcctcagcctcccgagtaactgagattataggtgcccaccaccatgcccagctaatttttgtatttttagtagagacagggtttcaccatgttggcctggctggtctcgaactcctcacctcaggtaatctgcccgccttggcctcccaaagtactgggattacaggcataagccaccgcggtaaaaatgcatctatgtatacagctgtctgtcaagaaatagtctagaatggtattcatttaactgttataatctacctctggaagtgagatgttaaatgcatttatcttttatttcaagagtattttttgacatatgcaattgtaaattgtttctaagcgaatgaaactgagaattgctgtagcactgatagatatgttaatgagcttgactgtggtagtcatttcacaatgtgcccatatatcaaaacattacattgtatatcttaaatatatataatttttatttgtcaattatacttcaatgaatctgaaaaaaagataaattaagatttttaaaaaagtgttctgtgtaacaaatcaatttttttaaattaaagtggaaattaaaatgaaaaaatatttacttaaagaaggaaagataattcaaataccctctggcctgaatcactacataagggactccttccccagagggcaatgtggacatgagctggggtctgagtagctgatttccagtatgacaggaaggcaaagaccagaagcaggtggaaactaccgtcatggtctgacttcttaggagtggcaggcctggtccagaactgtggcctccctcagacctggggaccctaaccatcctgagtatcgaaaagagaaaaagcagaaagggccctagagtttatctagagcaaacacttttttgttcaggtgaggaaactgaggcccagagaagggaaggggtttgcatccaacagatgtaggcttctagagggtgaggactgggttttgcaacagacccagtgcaagcactgcacaggcagatgtttaaagcatatttccaggccacacagtcatgagtggctgaaccaatcacagaactcatgtctcaaagttggactcaaagcccccaaacatggtgccaagagggagcacaggctgtgggatgaaacaggcataaggtcatgcccctctcctgctaaaatctccatcagctcccatctcattcaaaatcaaggttatatctatggctcatgatgtcccacatgctctgtcctccaccatcactctctcccccccgaagccaactctcagaccccacctcctaccatgtgctcactcattcactcggctccagccacactggcttcctggctgttctttgacctctcaggagctttgcacgtgctggtccacacgctgagaacactcttcccatggattcccccaccactccccacctcttgcagagatttgctcaaggacgatcttcttgtgatgacttccctgaccacccatattcaaactgccccttcccaattaccagctcgcctcccccacccttttcctgctttgatctccctctgaagcttatcaaccacccaacacaccatggattacattcacttatccatttcttgccactagaatgtaagcccataagggctgggctttctgtcttttccttgctgtatctccatccttagaatagtgcctggctcatcgtaagctcccaataaatattagtgaatgaatgaaatagaccggatcaatgcccagcactgccttgagcagatcgcttggctccctgttgtgtcatcactgttaaattgagatcacaatgtcataataacaagtgctaacatctggacgtgtaaggtccagccaacctgctctgtctacattatctcattgtctcacacagccagtatggagcagagccagagttcgaagtcaggtgtttgtgactccaaatcccatgatcttaactacactgccataatgcaaaggatactgtagactaaatgcgatttcaacatcaatgtgaagatgctttgtaagtcatgtagggtgaagggctgttattgttttataaggaatttttttgtctgtatggactgttaaccctgcctgcaaccctctcctccttgactgtcatgcagtttgtgctatcttgcttttttgggtctcttctttcaagaggaaagtacctgtgatcctcaacctcaccagatctttagggatttaatgtgctgccctaccctttccatgtctgcatttttttttaaatgaggctgttgaggttaatgtttaagccacagagatgaatggtggaaactcaggcattaggtcatttggagaaaaattcagggatgggaggaaaatggtttgcagcattgaattcttgttcatcatctccttgaatcaagcactgggtcctctatgaatttcaccagtaacttacgcttctgtgctggcgagaaactgcatctccgtgggcacagtgtgtaggccgtttctccgcacagcagctaggaggaaagagcatgatgtctttaatgtaatgtagcgaatggaacaggagtgtcccaaatcttgtgaagtcagtcaagaatgctttctttgccaaggatcctatactactcactgaatcaaaagacaaagacagagagagagaggaagagagggaggaagggagagagaggaagggagagagggggagggagggagggagagagagatggaggaaggaaggaaaggaaaggaaaggaaaggaaagggagggaaagaaagaaagaaagaaagagggaaggaaggaaaggaaggaaggaaggaaaggaaaagaaaggaaaggaaagaaaaggaagggaaaggaaagggagggaaagaaagaaagaaaggaggaaggaaggaaggaaaggaaggaaggaaggaaggaaaaggaaaggaaaaagaaaagaaaggtcattcagcattctatcctcctgtcctaccatccatatgtgaagatgtgcccaggcctgttggcaggggtttagctgcagggctgcttgacaacccataactcaagcttaggcttacctgagcagccattgccaaagttgtgaaaggccagctatgaatggtaatgagtcatcaatgggttggacgaccccaattgtccattcattcattcatccaaaaagtatttattgagcacctactatgtgctattgactatgttctcagggtactctgtgaacaatatagaacaaggcccctggcttccatggaggtcatactctagaaggggaggcaggaaataaatgaataaagaaaattttaggtagggacaaatgtatggaggaaatagaactgggtaatgtgactggaaagtggagaggggagtaggtgggctctcccttcaacagagaagacactgtgtgctgatggcctcgggtctgagacctcaaggataaaatggaatccatcctatgaagagccctgggaaaagggtgcaaggaaacaggaacagcaagtgcaaaggcccggcagtaaggaggtgcttggctgagatgaagaactgaggaagcccatgtgctgggaaagaggtgtataggaaaggcctaggggagatgggggtggggacggagtgggcaaaggccaacgggaactaaatcagggaaggggaccccctgcaggatttaatgcccaagacgatatgatttacattttataaacaactctgggcctggtccgagagaatggacgtagggaaaggggcaaaaatggaagctgagagtccagttctggatctgttgcattttccagctaagatgatgatggctggatttggctggtaaccatacagaccctgagagtaataagtggtggatgtgtttcagttcttttgagataagagcttggtgcaacttggaacccagagccaaaactggggcacatgaaccctagccaactgatccctcagcaaatcgctatggagcacctgtcatgtacctggtgctgagtgacaaaagatgaaagtccatgtcctcatggagctgatcttctggtgggggagacagaccacacacgactaagtaatatacgcagtatgtcaaatgaagatgcatgccatgcaaaagaacaaggcagggaaggagccaggcatcctggggtgagacaccttcttcaaggctcaaagaaagtctgatggagaaggaaaatttgactttgaaccaagacctgaaggtgaggggatgagccaagcaaacatctggggcaagaaagagcaggtgcaaaggccctggggtgggagcacacccaggaagcaaaggggaggccagtggagctgcaggggccagagggaggagaagagtaagaggaggcaaggtaagagaagtggcagggggtggaggtggtaggaagtgggtgggatcatgcagggatctcagagctcacaggaaggactgtggcttctcctctgagtcaggtaggaactagagtagcatttgagcagaggaggctcaggacaggagctaactttgtttttaaagttatttctctggtcaagtgtggtggttcatgcctataatcccagctactcaggaggctaaggcaggaggattgcttgagccgagagtttgaaactagcctgagccagatagtgagaccacatctctaaaaaacattctccaaaaaattagctgggtgtggtggtgcatgcctgtagtcccaaccactccagaggctgaggtggaggatctgttgagcccaggagttggaggctgcagtgaggtatgatcatgctactgcactccaccttgggtgacagagaaagaccttgtctcttaaaacaaacacacaaaaataataaagttatttctctgcttgatagaccagactccccagcagcctttgacagtgttttggagaaaagaaaattagaatgaattaaatgttcctgcagctggaaccaccaccaagagtaaaataactcacctctgggagttgggtgtgtggctggtagccaaacacatcagccttgggttcaaatcctagctccatcacttacaatgtgactttaggtcagtagttcccagcgagggccaattctgtacccaagagatgttgggcaatgtctgggggcatttttggttatcacagcttgggtggaagggcaaagtactactggcgtctattagttagagaccagaaatgctgctaaacatcctgcaatacacaggtcagcccaccccagcaaagaattatcccacccaaatgtcattggtaatgaagttgagaaaccctggttagggtatatcccttaatctccctatacctcagttctttaatgataaaatggaagtaaccattctaggattgttaagaggattaaagagttaatctactgccaggtgtggtgactcacgcctgtaatcccagcactttgggaagccgaggtgggcagatcacctgaggtcgggagtttgagaccagcctgaccaacatggagaaaccccgtctccactaaaaatacaaaattagccaggcatggtggcgcatgcctgtaatcccagctactcaggaggctgaggcaggagaattgcttgaacccaggaggtggaggttacggtgagctgagatagcaccattgcacaccactccagcctgggcaacaagagcaaaatttcgtctcaaaaaaaaaaaagagttaacttattaaaagcaaggatcaacaaacttctgtaaaaagccagatagtaaacattttaggttttggggggccatgaggtctctgtcataacaacatctctgccataggggcagaaaatcagccacagacaacatcaatgcttgagtgtggctaaacttttatttgggggacatcaaaaaaatttttgttttgagataggatctcgttctgttgcccaggctggagggcagtggcacgatcacagctcacaacagcctcgacataccaggctcaagtgatcctcccacctcagcctcccaagtagctgggaccacaggcatgtgccaccatgcccagctaattgttgtatttttttttttttttttggtaaaaaagaaggtcttgctatgttgcccaggctggtctctaactctggggctcaagcgatcctctcacctcggcctcccaaagtgctgggattacagaagtgaactaccacgcctgggctgaaatttgaatatcatataatttttcatgtcacaaaatatttttctgcttttgatttatttcaatcacttaaaaatatgaaaactattcttagctcccaggctgtaaaaaaacaagcagtaggctggatgtggagggccatgctttgtcaatcttgatataaagacttcaacagagctgggtagtcccagctcttgagaggctgaggtgggaggattgcttgatctagggaggtcaaggctgcagtgaaccgtgatcatgccactgcactccatcttgggtgacagagcaagacgccatctcaaaaaaaaaaaaaaaagacagaaagaatttaacaggaagctgagtactagcaaatgttcagtaaatatgggttaccatagagaaagaagaaaacagagcatagggaatgattctgacactcagagcctggtcacttcattctccatcatcttgtctaagggcaaggtggctgtgtcaccctcaaaatcccaacatccccctctcttgctaaatgagtgactgctccttccttacccagctcagaattgcctctggtctctctcagtgcccagcctccagtccagatcctgtcctgggttccttttaacacccccttcctgaaataatcagggtagctcatggcatgtgtgccccgccccctcactgctgtagtaaatgataactcagcttgtttcattactagggtattcctggggtctttggtgaaggccattgacactcttcaaggaacccaagcaagacacaaaaaaagtttgattttttttcttttttacatgggattttccttcacatggaagtcaggccacatacacagccatgtggacattccttgtctcgccccgtggtttggggaagtcccttccacaccacgggccgctctcgtggtacaccgttggtaccatgagggaacaggattccatggtggctggctgtgtcatttttcctgtgcctggagctggccctgttgaccccctgcaggggcctgaagatgaaagttgaatcagctgccctgggccatagggatgagggcccctgagcacgagtgctgggaacaggtccacaagccatgcacgaggccagggtccagggcactgaagtaggaagcgagggactattaatagcacactaaggttgggggcaaagttgctccccaggggatggccagacagtaagaactctgacttggtgacccccagtccccaccatcgctagctcgctctaccctcttcccacctgggtgctgtgcaggtgattcctttatgcagccagggtggacagcaacttgtctgaggttacagatagggaaactgagctcaccagtttgccacagccctcgcctggccccgtttgctctgcatctgagttgaagagccctgataagagattgtatgtgctataaataaggcagtgaagggtattcgtacacacagaactctaaacagtaattagctttatcatataagatcaggaaggagggagttttgctttttccttatggagattagtaatgtaagaaaagttaatatcaggcattattttctgatgatgatgatgataaagtcatgaagatgaaactggaaaacctggtgctgagcagagctcttaggcatttacacaggatccacccctgtgcttcctgtgacctcagtggcccaagagaccacatggaaacaggccagtggagcaaagtccccagagagacttctctgggtccagaaattgccagttgattagaagcttgatgcttctgtagggtcttattcacatcatacaaatccttgagtttgtgtcaggccaggggatggagaactttcacatttataatcttacagctgtctccaagcagccttacagagctatgcaaagtttattaccttcctcttcacaactggggaaactgaggcctagagaggtgggctaaattgggatcaagaggacccaatgggtcagtggcagagtcaggattatacccagaactttggatctcccatcccctgaacctcggtccatctccaaggcacccacctgtcactttagcaggtctgacgtgaaactgataactctagtctagcctccctggtatgactaagatgttcttaaaatttgacacgaagagggccctcaggaaagagttcttgtgtcaaattaggtaaacggcaatccagggaaggtcaaaagcccccaagttaagcaggtttatatccatttactcacttagcactcatgtcagcctaagtagtaaggattattatccctgttttaggtttgaggaaactgagacatagaacagttagttcaatggtctatttgtgtattcattaattccacacatttattgaacatctactatgtaccaacagtgtcttaggtgcacaagactgcaccagtgaagattcacaacaatgagaaagactgataggcccttcacggagcttggaacctgtggaggagacagattataaaccaggaagcaaatcaatcccgctcaagtaggaggggaaacaccaaggtggaacgaggtaggaggtcttattacctgtgcctccaatgcctggaagtctcataggtagtttttaatacaactgccatatattaaccacttcctatgtacctggctctcgtttctcacgtaagaggcagtgtccttgttttatagatgaggaaagttgcagaaggttggttagcatatggatgagcaccacgcttcactcaacattaaagacccttgtgttgtgaagggtggcatcctgggccttcctataaaataaagatgtagatggcaagttagctttctatggacagagaaaaggaggggaaagagtttagattcaaaagccaggtggaaggccagatatggtggctcacgcctgtaagcccagtgctttgggaggccgaggctagaggatcacttgagcctgggagtttgaggctgcagcgagctgaatgcaccactgcactccagcctaggagacagaggaagaccctgtctctaaaaaacaaaaacaaaatccaggtgggccccttactggccaaggaacattgggcctatcatggctgtgagcttcagtttcctcatctgtaaaacaggcatgctaatagtgcctccccacagggctgtggtggaggacctaatgagagcgtgcatgcagggggacattggcgaagccatcactcacatggcccctgggtcccccaggaagtgcagggcacagaactgagcaaaggaactggagaaaggcaacagcgctgccctccaagtctgaggacctctggagtcttatccagatagccccaccctgccctaggttctgcctcctctgtaccaggcaccatggcaaggtgcttataagcacagattctggattctgacagagctcagcaaatcatcgtgttactttgggcaaatcattttgcttctctgagcctcagtttcctcatctataaaatgggcatcattacctcctagtacaattatgaagatcagatgagctaatgagtataaaaaaattagcatggtatctgcatgtggtggttactcagaaaatgggagctcagctcacatgatgattatggttgctgctggtgctacagatgtccttcatgaacctatagctcctaggaacttccttgtgcctctcctagcccactggcagaatctctactccctccacccctgtcctcgcctcctgccacctggtcaaagctcagaactggatgaaagggaatagctctctttgtactggaattagccttgttttaggtcttagaagctgatcattaaccaattcctgctcctccctgatcccatggcctgtaaaggtaggtatctatcccaacccccaggatcccctccctcttgacatcctgcagcataggaaaaggctctggacttcaatgcatggccaccactgtgtgtggccttgggcaagtcccttccccttcctgagtctcagatttttcattctcacaatgagggacttggctttcaatcatttgcttgaccactttggaaaaagtctcatgtgggaggcagaataatggagcctgagaatgtaggctctgaagtcagccagcccggattcaaaataccagagccacagtttggaaactgcgtaacggggggtgggaggactctttttaattccttcctcaatttccatttctgtaaatgaggtcgatgcttgctccgtctcattcagatatgaggtccacctaagagtccgcgcataaactaagtgcacagtaaacattggttattattgcttagaggcccagtgtacaaaatgaataaagtgagtctaactagggttgaaatggggaaaagggcagagtcccaggtgcttgctgccaccccagggtgaccatcaggcagttctcttaagggaaacagtttgaaaatcaagaaagccaatattgtacagcaggggtcagtgacctacaatatgcagccccaatccagcccaccgcctgtttttgtgtggcctgccaactaggaatggcttctacattttcaaatggttgaaaaacatctatggaagaatatttcctgatacaaaaattatatgaaattttaatttcagcacccataaatacaatttttttgtcacattgccacgcctgcttgtttgttttatctgtggctgctttctcactgcaagggcagcgttgagtagttgcaacagagtggcccacaaagcctgcagtatttactatttggtcatttatagacaaagtttgttaatccatgctataaagcttctcttcacttcctcgtggaagactctgccgttgcatagagctgactctgccactttgccaatgctatgatcctcaacacatcatctcacctctccaaacttcatctgtaaagtacatataatcatttctagtgttcagggttgctgtgaaaataaaataagcaggaccccttagtgtatgacggggaaatactcatgtgactgtcagtgagattaacttagatggtacacggatcaacatttaagttttaacagatacgtatttaatttaattcatattttaaaaactagaactagcacacaaaacctatggtttcatggataatgcttgttgtgttcactgaggtaaatgatccaaagccacaggggcagatctgccatctatctctcaagatgtggctcctgtctttgggtcccaggtgccatcatattcacattccacccggcaggaaggacagaacccggaagttgcacacatcatttccactcatattccattgaccagactcagttatctgaccaagtcttatcacaaggggagcttgaagtttcagcctttcctcagagaggaaagtattgggttctattcctaaaagaacaaaggaagaatcaatgccggggttaaactagccatttctgcccacatatgtatcaattcaaatcttccttttaaaatacagttatgtaaattaaaagtaagacattttaaagtgacatgatgtggcagccactttgcaaccataagaccaggggaaccagagttgccaatgaaaaatcatgacgtcattgtgcctctgaattgatcctggacttctttaacttcactgtgtaatttgggaaaatcatttccctcttggagactgtatgtagtcacctaaaaatacaatggctgtgtatgttttgttttattaagaacataatttcagaggattgagggaatcaaatccctccgttcataatacgttatcactatttacttcacaaagcctctctttcctataattgattgggtctttttagtcctttctctccccatttcccactctcaccctttccatagcaaccattctgatatgtttaatgtgtagcttttcatcatacattgcttacaaaatcttttgtcgttcatgtgtattttcagcttacatattgaggttgtattctagatctcattctggtttttacctccaatcataactgctctatgagatccatttatagaagtacatggttcactaattcttctctcttttaaaaggagcataatgctcaatggcatgtatccaccatatttgcctttgcctgtactagcaataaagtgcatgtagccaccaacttcccacaccacagagagcgctacagtgaatatcactatgtgcgttccctcctggacctataggagaattcctttggtgtctgggagcaaaactgctgggttacagagtataaacacatttaatgtgattaaatccttgcacaagatccttaagaaactctaacccagtccacactctttctagcagtacacgaaagttcctgtggcccctattcctgtcaacatggggattcatcagcttccttatttctgcctgtctcattgattaaaatgttattgtttcaatttgcatttctctgagtactggtgatgctgagcatctctttgaatgctgtaaaacaaggtttaattatagtacttacttcatagagctgttttgagagttaaggaagataatgtatgtaaagagttcaactcactgctcagtatacagtatgtgcttaataaatgcaaattttaaacaaccaaggtaccatgatttcttatctaattatcagtcattgtcataactaaaacacctgacgcatagtaggtgctcaataagtgtgcatgcccttggccttccctaacatcctttggacatcccattcccacttccaaatcctggtggatttggccccaatcccttagcacagcctcacctgtgttctcttcactctcctggctggggtcctttcgaacctccttctggccaaagagacttttcaggatggcattggcaatgggaagcatcatggcagtggaggcggtgttgctcagccacatggacaagaacgaggtggtcaccatcatccccaggatgagcctgcagagcagatggcattagaggcaaatccagaacccagggcccaggagatcctctggtcccagtttgccatccctgaggaatacaatccatccattttacagatggaaacttgagactcaaagcagaaaccaaatccactcaccaggtttattttagatctaagaaaactgtggttcagtgtgtttaagtgaactgtccataggtacccaggttataaagacatcccaagcctgacgttttctctttcttgccctcaaatcctcaatgatacccatttcagaataaagttgccggggcaccaagacactccactatctttccctcatggccttctcagcttcctccctcttttcccctcctcttaccagctactccctgctgcgactctgctgaacttctcacccgcacccaacacctttactcccctgcctccctgcctttgcttggtccattcccaccaacagaatctaagtatcaggattttttctctttatattgaactctgaatccacctggaatttacttagatgcatagtacaaagtaagatgtaaattttttaatagaagaaaccaattatcccaactctcaccatttattggaaaatccttccttcggatttgggtttcctatagatttattctgtttcaaaaatctgtttccagacttgtgtcttactgttttaattattgtaattttagaatatgtttaagagcagccctactcattattcaaagtcaagctcaaatgtgacctcctccaggaagtttccccctatctccctacctctcatgtgggctctcacaccatgatgtgccccttggagatcaaattccacttggcattggaattagttccatagatggagtctgtcccacaggactggcagctcctccaggaggaggcgcagctacagagcctagcagagcagatggcacagagataatgctagaaacctaggagtcatccagaaccttcttttcctacgccctcccctgtgtcaattttatcacccaaattactctcaaatctatccaatctgttcatctccactgccacctcctagtccaagctgctactgtctcttgtcgggacactctaaatggccttctaactgggatgtatcagcttctcatgcccgtaccctcctgtctgacctctacaaggcagctaagacgaatctttaaaaaatgcaaatctgaaggaaatgagacgtatttgaaataaaatgcaaatctggccatgtcattcctcagcttagaaccctttaaagcacagatttataagtctatggatataattcagaactggattgggagaaaatgtgtatcctcattttgctaacatctaatcaaattaagcatttccttcagggataaacaggcaacaaagttgaggtgtatgagcagtgcctgaggctctgtcacccaaaaaaaaatccctgacattttctctttcttttttttctttctgtcttttcttttctttctttctctctttctctctctctttgctttttttttttttttttttttttgagacagggtctcactgttactgaggttggagtacagtgagtggcgtgatcttggctcactgcaacatccgcctcctgggttcaagcgatccgcccacctcagctttctgagtagctgggatcacaggcatgcgccaccacgcccagtgaattttttgtatttttggtagagacaggggttttaccatgttagccaggctggtcttgaactcctggcctcaagcaatccacctgcctcagcctcccaaagtgctgggattacaggctgggattacactgcgcccggcaagatccctgatatttttatatgacattataatcactgcagacatcttgaaatatcatcgacactcaaaactgctcaacattatgggtgtgattaggcctatcactcggtcttgccgtttgcggtgttaataaaacagtacctacctgtaccagggcacaggtgtctgtgttcaaaaaaaaaaaaattagataattgcattttgctgtagctgttgtttcaaactctgttgtgcattatgcatttaaaaacattattctgggaagatccttaagattcaccaaattgccaaaagggtttatggaacaaaaaataagatgaaaataaaacccctattttaaaggccacccaattctctaagaataaaagtccaaatcctagccagagtgcccgaggctctttaggattgtaaccctgcctccctttcccttcaagcccatcttcccacatcctctgcatccccccaccttcaactcccacctgatcttcatcatctaggcaggtaaatagcaaacaagaatgctaacagccagcattgcctgctcaggtccaggggatttgcctgcatttgctcatctaatcctcactaaactctatgaggtgggtgccactacatcactatttcacaggcagacagaggttaagttatttttcagagcaggtcacctgggattcagccctgagcagtcagggtcaaactgtcagtgtggccccctccaaaactatgggactggaatccctgggggtggggcctgggggtcagcagctcatgttcccaggtgattcttctgcacctttgagaacagctgcccatgatgggcctagtgctgtgtctagcatgcagcaggtgcttgctaaatagtagagaaataaataaataaataaataaataaataaataaataaatggtgggaaccgatgagtttcttggcctggacgagtaaatcaagaagagcaggtataggctccagaggtgtggtccctctgcctctccgctgtagggctggaaccattacctgttcttacctggccggctggactccaacaagcatcaggatcttgagggcgattcgccggtgcaggttccactcctcaatggcgctggccatgatcagcccactgaggaagaggaagttggtgtcgaggaagtactgggggcagaccttgttggagggcaagatgcccatgaaggggaagaggacgatgggcagcagcgccgtcactgagagcggcagggcctccgtgcaccagtacaccgccatgagcaggatgacaaacaagcagcggccttcctgcaggaggagatgcatgctcagagggtcagcggggctcggggcagaaggggaaggaggcccagggctcagggcagagggggaaggaggcctgggctgggggcagagggggaaggaggcctgcggcagggcctgccccggcttgttctcagggcagcagtggagcaggtgtgtgcctaaggcgttgacttaaagcaggtggcatcacctttctaagcctcattttgctcaattataaaatgaggaagctattttggttcacctcataggactgtttgagaatgaaatgaaatacattgttgtcttagagataaagacgagaatgaaaatagtttacttgatagaggatcccaggaggttctggaaggacaatggggaaatgaaacagaaggaagccaatccagagagtgtcccatgagaaggttaccactgtggacacctggatctcaattctgatggggacagggcagaccatgcttcagtgtatgtcccatgagaaggttaccactgtggacacctgaagctcaattctgatggggaaccctgggggacagggcatatcatgccttagagttgtctcaactggaggcaaggaagttggagcatttatctgccaactcctggccatcattggttgagggctgatactgggagcattaactttcagcacttccggcatccttatgtgcagactgagcatgctcctgcagccaggggaaatactcccgcagtccatctcagaggcagtaggaagctactagtgtgtgcggaaatggtgagcaccagtgggggtgtggagttgggacagggagcaactgccacatccttacacggtacttagtgcaatgcccaacacataatgcatactccataaacaataacaacagctgacatctgttgggctattaagtaccaggtgctatttattcctaacaaaatcctagtgatgtaggtatgattattacccccatttgatggattaggaaactgaggtgcaaggaggtggttagcaaggtaatggctgtgcagaccagggtagaccaaagcaatctacctccacagccagaccttcatacaagtgccctgctgctgttctcagctaaatattagacccaatgaaaggcagacaaagtaatttaaatctaatcagtggttgccaaggctagggtggaaggtctatgttgtgggggcataggtaggggttgcagaggagcacagaggaaacttttgggctgatggcaatgttctatacctagattggagtggtagctacattggtgtgcacatttgtcaaaacctgtcaaactacacacctgttctcataatgagagtgataatgacaatgacttcacatctgatgcatccgtgtcccacaggattcataatacttaatgtcctattatttgcatgatcactgttggaatgaaactattcctgccctgcccttgctttcttatgtcctttcaaggcaacgatcttgcatattctaggaaacatgaactttttcttggatttggtcctgtctggagccatcttatggctcttactttatagtaagttttgttaactttattccatgtccataggacatcaaacagcgcaccatcctaagagccaccctcatagaacatatcctcagcgaaacaggacaggtatcaggttacgtgggggatgctatgattagttaatccatcttacagggaggccagggagggaccacggagacccatcagacaactgtgacaacaatccaggcaacagacaccggccaccagggcccattgctggcagttgtaggtagtgagaagtagttgaattctcgatcaatttccaagatcacgtctgacagcttggctgatagatctgttgtgatatgtgaggcaaagagagaaaccaagggcaattccaagttgttggtctcagggaaggtggggttgtcatttactgagatgggggagacacactgtcaccaatttccataccttgaaaaacacatcccgagactctgcttaatacaccctacattggaaaatgtccagattcccaagtcccttagcttttctatcagtgctcacattcattcatgaaatttatagatgtgcaaaaagtctcccgctgggagaatttctgtacagcacatcctattttcctattgacttaagatacattgttttagagaaaaaattaaataagctgccacagttaatacaaagttatccttcaggatacctaaaatttatttcctgggggccagagaagaacaactgcaaaacaaattaactcaacttggaatgaatatcccaagaacccaggttattggacacacacactaaaggttgaaagcaaaaagaataatacagaatcaaactccacaaccaaaaattctctaagttttgatttgtcatcatcctttcagtttctcaaatgaggcagatcctgcatctcagaggtaagatatctttgagaatcacaagaccagagtccataaatacttataacccccagccctttgttcaagcaaaattgtatgttgaatctcagtatataaaacagacaaactttgaatgtaaaaatcagaaaaaaaggcactcttctggagaagtgagaaaaagagctgtcgatgggcttctctgttctctccctcccttccacctatcctggcagcccctaaacctccccgatttggggattcaatggcagatcatcagatcatcaccaagcccctatcatttccctggctctacagatgtggagactgggaccagagaggggaagaatgagtcagcaggtggatgtcagagccgtttccagaaccccaaagctcccccaacaagaagctgagacccttttgttggaaaagcctcaatgtgtgcttggagccaaagggcatcatcccagaattccacagagatagagggcaggcccgtcccaggtatacagcacagcaaacaaggatgtggggaagcagtggcacaataaacagcaccctgtttagagaagctcctggaatcccaacattctgcctacagagctttagtaaccacctggggagccagtgtaccaaaggcttcagacttggccaaggccacctcagccttcttaggctgggaacctgaatatcagctgggaacaatcggtttccacagctcagagagccaaaggggccttcctgaagacatacaactttggagagatggagccacctctcctcttgagtcttggctcctggtacaaaagcagcatgaaactctgtctccagcccattatcctgcttcatgttcttttatgtaaccggttaccacctgaaagcagattttatagctttatatgttttctcctctattagaatgcaagctctaggagagcagggattgtgttcccagtgccaagaacagttcctggcacattgtaggcactcaaaatatctgttgaatgatgaaaacatgtttctacaacttagagaaaaagcttgatccaagctatcattcattcatccatccatttagcaaactttattcctgaccacattttatgccctgggctggaagctggtacaaggaaaatgactaagacatagcctaaatttttaacaagtaaatctggccatgccaaccaataaacagttcttagtcaggtgcctatagtcccaggtacttgggaggcttagggaagatgattgcttgaggccaggagttcaagtccagcctgggcaacacagtgaaacctggtctctaaaaaccaaacaaaaaaaaactacagtgcttctcaaacccaaatcaccttcccaggctctttctgccaaatatccctcaaacaacagatgtgtgttggtaaatgttgaacaattggctctctgaaaaacttgtgtgtgtgtgtgtgtgtgcgtgtgtgtgtgtgtgtgtgtattaaggtctgtatttaataactggctattagaattcctaaaaatttgacaagcacatttcccaagccagcataagctggctgcagcacaccactgtgggcctccaggcagaagaacatccatgtatcaccccctgggccaggaaatctgcatcacattctgcgcaaaactgactttcttccacccatgcttggtatcctgctccacaatgaattcgtgcttttaaaaatatacaattactttctatcaaatcttcctgctgacccaagaaggaatgccccatgtatcctgttctgtgtaccactcaccagaccaacaggtatcccaatttgtaaatatgagtcctcggtggagattatagtctcaaattcccacagaagcccagacataccataaattaactcttggaccccttcagacaatcctcatctttgcgttttgaaaatgatatgactataagatgtttcactttcatcttaggtctattatgagacacctagacccctagactgtagtccacaccgctacttggcattcaaggtttggtgcccagcccatccctggtcctagattcctagactgtagtccacccctctactaggcattcaaggtttggtgcctagcccatccttggttcatatgcttccactgctcaaggagacagacatgaagacaaatcattcacctcccagagagacaagggctaaaacagagtttaagacagtgagctatggagcaaaggtgaaaggcagctgtgtcagccagtggggtctgagaagggcagacacctcagcacctccttgctatggtctcagtgtttctgtccccccagattcatacatggaatcctcatccccattgtagtggtaataagaggcagggactttgggaggtgattaggtcgtgagggctctgccctcactaataggattagtttcctcataaaaagggcctaagagccttccttctgccatgtgaggacacagcaataaggcactgtctttgaagcaaagagcaaggccccaccaggcactgaatctgccagtgccttgatcttgaacttcacagcccccagaactgtaagcaatatatttctattgtttaaatatcacccagtctaaggtattttgttatagtagcccaaatggactaagacagtcctccgtctctcgcttcagtgcccatcattcctgttcacaccagtgacgtcttcagatttctccggtttcagaagcacacttggccaagactgccaagaaataacactccaggagtagctcctagccacgaacttcagttgcctttcagtgggataactgaggcatgtcgaataccatttcccagaagtccccagtaaggctgagtcactgctgctggtagtaacctcttcattggcacacttgtatttcttccatgctcttcactgtttcccttctccactgcccccaaattccttgcagtcaaattgttgtctcagggtccttctgaagacccaatctaagacagaagccttctcagacagggtgacatctttccgagctaggatttgagaggtgtttggcacagagaaggagagggactgccttcttgcctatgctggaagcctcttttgtatttgagtcaaaaaaaggctcatgtcctccagctggatttggggtttatctgagccaaacccagttgagagaggtcccaggcatgatctgatacaatagagtccaagctctgtcattagagcctgagtctttaggtctctcctctccatctgcactgcccttgactaaggtcaaacttcatcagctttcactgagactatttctcaacttttgcacttgtcttcatgaatcctccacataagcagtcaaaggaatacttctaaaatgcacttcagattatgtcactcccctgctcaaacacctcctctggctccccatggcccccagactcacagtcatggcattcaaagcttatcagtgtgtcccagtacaggcttcccacattccccactttctctgttatcttggacacagttctctcagcagtctacgctgcttgtcattctctgggcctttgcacatgcttttccttttgccaggaacattcttctgcttcttcatctagtgaattatgactcatcttgtaaaggccatttttatcctgtgacccccaccctaaagtcctggtcagttccaatatctatgctctcacagcactcggttcacagaagagcagaacagcacagcggttaagaacatgggcttgttgcaagacttcctggatttgaactatagcttgattacaccatgactttcgtgaccttggataggtgacttaatgtccctgtgattcaagtttctgtcatttgcaactcagactcctgactaaaacactcaccttctccatcctcctaacaataaataatacctgacattttaatagaacttaatgtgtgtgctttcatccttgctattgcaaaattcagaatatctctgtcacacagtgatggaaaaaataagaacatttattgaatgttactatgtgcctgggactgttctaagtatgttatgtctatttgttcattaaacaaccttatgaaaggaaggttagtattattttcatttacatttagcaaatgagaaaattgaggcacagagaggttaagacaagggatcttcaaaaagttcatgaaaagtatgtattatttaaaaactatgcatgggtttcaaatttttgcaccaaaataaactcatactaacttattatcacatgtctgaacagaatctagtttgaggcactaaaaaggatagttcgaaaacagcccctatcagagcaacatgaattctgctaaaactgaagcaaaaacaaatatcaaattgatgatgaagtttggatggaagaataatgaaataattgacactttatgaacagtttatggggacaatgctacaaagaaattctagtttacaaatggataatttgttttagaagggatgagactatgttgaagatgaggcctgcagtggcagagcatccacatggatctgcaaggaaaaaaaaattcatcttgttcatgccctaattgaaaaggaccaacaattaacagcagaaacaatagccaacaccacagacatctcaactggttcagcatacacaattctgactggaaaattaaagctgggcaaactttccacttgatgggtaccaagaccactgcaccgagatcagctgtagacaagagcagaactgtcaatggaaattttaaacaaatgggatcaagatcctgaagcatttcttctaagaattgtaacaggagatgaaacatggctttgccagtacaatcctgaagacaaagcacaatcaaggcaatggccatcaagagttggaagtggtccggtcaaagcaaaagtgaactggtcaatagcaaaggtcatggcaacatttttggggggatgctcaaggcattttcctaattgactttctggagggccaaagaacaataacatctgctcattatgagagttttatgagggttagccaaagctttagcagaaaaatgctagggaaagcttccccagagagtccttcaccacagcaatgctcctgctccttcctctcatcaaacaaggacagttttgtgagagttttaatggggaatcattaggcatctgtcttatggtcctgatatggtttcttctgacttctttttgttcctaatctttaaaaatctttaaagagcacccatttttcttcagttaataatgtaaaacaaagatggcattgacatgattaagttccgcagactcttagtttcttaaggatggattaaatagctggtatcatcattacaaaagtgtctataacttgatggagcttatgttgagaaacaaagtttgtatttttatttttgtcttttaattccattttttcatgaactttttgaagtcctctcatcttatagatggttctggaataaaaaaaagttgtggctccaaatccagaaaaatacactgagtacattctgcacggacagaataactggcagctgagtcagctgctaggggcaacccaggaggtcttaagcaatctctgtgtggaacttcccggcacatcacatccaatgtcacatgatatcttcccaagaaatggttctaaaatcaaataagtttttcaggaactgttctccctaccgctccgctaaaaattcataattggtacactgaaagtgctaacaaatcatgtagtacatatatttatttgaccttatctaacccaaagtttccaaaatacgtttgaccacggattgaaatatttcttaaaatcctccacaacttatgctccatggaaaatagggtggtaaatggtgccaaattgtaacctgcaaaggttcatccattcaaaatgatttactgactctgtctcctcgactactaagaaagttccctgagaagacggaccccattgcttttatcttgttcacgtctgtgtccccagaacttggcacagtccccaacacattgatggagttggtttcagggagtgtggaatgagtgaaagaataaatagattgtgaccctgactctttgctggccaccatgctggaagttcaggaggtagagatgagtaagtgaacatctgcccttgaggatctcagagtctagggatcaagcaggtggatgccggctcaaataactacaatgggatcaacatgtggttctcagtaagctagggacacctaggggaaagtaattaacttaactcagaggacaaagaaagatagcagggaacagttttcttaggaagagctatttaaactaaatctcagacaataaaagcttttgcagattcctaaggtcagagcctcccctttgtccagcaggcacttgagcatttatttgcctattgtactttaaaatatgagggcagatttctggagcagtaggggattcttgcaaatttgctcctctaactcaacaggaattggtgtgtggtgtgtgcgtgtgtgtgtgtgtgtgtgtgtgtgtgtgtgtgtgtgtgtgtgtgtgtctgatactcatgaatagcaacaaagttacaaatttaagaaggcaatatagcttccctgctagggacactctaaggtcagaacttaatagatgacaagaattttaaaaagacatgactcagatcttacaatatcaaagggatacaaagggatagtttgaacaactttttaccaataactttgatgatttcaagtaaccagaggaacttcctgataaaaacatacctttctcaactatcagaaaaagaaattaaaaagttgaatatttcagtgtctattgaagaaactgaatcaatcattaaaaacctccccacgaaaaagctccaagcccttctggcttcaatggtaattctaccaaacattgaaggaataaataataccatcttgcacaaactctttcagagagcagagaaaaagggaacacttcccaattcattttatgaggacaggataaccctgttacctgggtgatcctgacaagggcattaaaagaaaagaaaatggaatacaatggttgagaacagtgacatgcagtcacctggaaaatttcaattctcaggagctctggtgagagtttccttttctatgcagcttcacatctctatgcagaagaataactacagtataatgacaatcacaatcaccaacattttttgagtattctctaagtttcaggcgtcttctatgtattaactcatgtaatgcccctaacaatcttttcttttcctttcctctctatctttttttgaaccaaggtctaactatgttgcccaggctggtcttgaattcctgggctcaagtgaacctcccatctcagcctcccaagtagctgggatgacaggcatacactgacacacctggattcaggaaggtactattactttccccctctgttttgggggaaattataaaaagatgtctatttaggtcatgcatacaatgctgtgtcccaggtaattcagtcccagggtagtgttgcagcttacaaactgtgtagtctaaacaggaattctaatttttaaactcttctcttttaaacatttaagggactcaaagtataacgatcgctagcaattaattagcaagcaattaatttccaagtaattgcatttgtgaactcattttattttcaaaacaatcctttgaggcagatattattagctctattttactgatgggacatggaggcaaacaggaaaagtcaagtaacttgcccatagctgctgaggcagtcaggatttgaacccaggtggtctgaccagagttttctctttatcactatgtatttctgcacaatccgtgggtgttcttgtcaaatgcctacatcctctctattctctagcatgcctgaaaatctctctcgttcctaggccaagagaacctctctcaagcttcctggctccttgccatctctgcccctccatgactccccatctctgcctcactgtctcccacaaggcatgctaataataaccatcctgttccttgccaattcctcattcacaggaaccccatccttctagttctggctcctttctccagaaaataacctatctggaggctctagttcttcctctcttcatgcaatagcaacaacaatcactatcaccataataatactaataacagtcaatacctattgagaatttgctatgtggcagacactgcccaaacaactgtacctgtgtattatctcagtttaattgtgattgtcacaacagccctatgcaggaggttccatgattatctccatttagcagataatgcaactgaagcacagagtgaataagtagcctgaccagggtcacagagatgaaagtagtggacagcctgctgggtagacacaaggcaagctgctcatagcattatgctattacacaagggggagatggagagagctagacaagctattcccaaatatccaatcagtattaggatggatagcagcaaaattgtttagcataagtatatcccatgcactatttgggatatacttatagtttaaaaatgactccttgttcatctgaaattcaaagtgaacttagcaccctgtgttttatccctcaaccctagctggaccaacattccaaagatgtgaggagggaaagcccaagtatttctaaagaccagatgtggttctgaagtgagaatttcagcccaggtcctctttaaaatcctgcctaagaggtctgcttctaagtgatataggacccctaagggagttcccatatataggaaaccaggaactagagggggagcagccaggggaaaaaaaacccaagggaagggctgtgaagtgttctgagaagggggagatcctctagtctcccgactctgtaatgctcacaagagaagggtctgctgtaaagggaagctgaggggcaggagtcatgcacctgctaggctccttgtcttttcctgccccctggcttctttcactgtggctgtcacaaaccttgcttaagaaaataaggaagaagagatgaaaccgtaaaggggaactcaggagacaataatctctctttcctctttctctcccagcttccagcctgtagagccctcaggaaggggaggggaaaggatttcacttcaaatcaagttccacattctgatgatcacctggaactgaccattctaatttctgaattgagaccatgtttgtgtattaaagtaattggaggattttaattacatctcaagagtgataggaaaaggcatgtgtctgcaggggtttttgtccaagtaataggaaaagaacttccccactgaaaatattttagagcactagctggagagaaaaataaacatgacttttaaaaaatagctcattgagctataatttacataaaataaaagttctgacaaatggtcatattcatatagccaccatcccaaccaagatataggacatttacatctccccagaaagttcctacatgcccctttcaggtcaattcccacatcctctccaaaacagtgctgcaatttctatcactatagattggtttttgcctgttctgggatataatggaatcatacaggatgtacttctgtctctggctgtcttttaattttaattttaccaacaagaatgagcttgaagtgtgtctggctgttttgctcagcgtgatgtctgtgagattcctccacgcagttgtgtgtatcagtagcctattcttttttgctgctgagtagtattccattctgtgaatagatgagaatttatttgtacattttcctgctggtggacatttgtattatttccagtttggggctactatggaaaaagttgttgtgaacactagaatacatctgctttggaggtgacatcctgtgagtccttttgtgcgatgtattcattctgtacatgatataaatggtaggaaagttgtttaaattctggctgcaaaggttgctgtcaaagctgtattctctctctctctctctctctctctgtctctctctctctctgtctctctgtctctctctccccccttctttttctctcctctccctccctccttcttcccactccctctgtctgtcctctctctccctccccctccttttctctttccttcctctctctcctccctttctctctctccctcctcctccctttctctctctcctcctccctctctcttcttcctctctcactccccctccctttctctccctccctctttctcctgtctctctggatgctcctgtcaggatgtcaactcagctttctgtgaaggaatgactccagatacagcacatgtcagctggagaggtgacccaagggaaatggcaggagttgggaagtcaatccttggcccacttggggttttggcagcaagtaggtcaagagtgtgttttattaccttgctggagagggactggagcagagccagagtgacccccaaatgcctgccctgcctcagctgagcttcctgtgggcaaatggattcagatttgccagctgtatgccagacatctggtggagaattagtaagaagtgctgctgcccctcatcccctgaccttcccactctgccaggacttaagaacaaaactaacttccagagagcaaaaatctcccaggggacttggaggcagggactagagcactgaggcctgtaaaatgctaagtggtgggctctcagaacaagcaggccaggccttttcccccgtccaggtctttgcacctgctgttccctctgcctggccctcttgaccccacgcacccccttctatctctggctggctggctccttgctgttcagccctcacttcaaaggtctcccctccaggaagtccatctctgatcacactgttcattgtggtctgctgcacattatctggcttcattcttgtggagccacttatcactagctgaagtttattttttgttcattcacttattatctctctctcgcctccctgcagaccaggagcaccatgcaaacagggccttttctgtctttgttcgcctctattctcagtgcctcaacaggtatttgttaaaagaatgaataaatgatataaagtcatttcaggcatttcaaactcatatgcaggggacaatttaatgagtaatatgggctggtgtaagaaaagtcacgttttctcaagtctgatttgcacttccaatagtgctgtggatatagaaaactattattttagcaggggataaaagttcccaagcttaacagtaacttacagctggcactggacttcagtgtcatgagtgcaatagggaggggcggggactgtggtgaagtggggaacacaggggcctcccctaccacgaggacaaccactgctgctcagctcctctgattgttgtgatgcaggaatgtgggtcccgtgatgccagctctcctgatttcaagagaagcttgaaattttgcttctatgtgaaatctcagttttaaaagatttgctcattaaaaggaaactgtgggccaatcaaaaaaaaaactacatctgcaggtggtattcaacctatagtcaccaatttatgacctctcatctaagtgatttgaattggtagaaggatggacccctgcggtaattaatgaaaaaccgacatattgtatatgtgcccacacatacgcaatactgaatgtaatgtcaagatgttgacagattagtagggatcaccggactctgtactgaaaacccctgctccattttaaaatccccattttacagatataaactgaggtctggagaggaggtgtagtgtcttcaggaccatgcagagcctaagagtagatctcatcactcccagccctggtccgtttgaaatagtggaatcatagaggggagtccaggtggatccatgattttactccacccaacagcagctctggtcaacctctgcctctgggcctcctgtttcatgaactcacaccagccacgtggccacactgaggttcattctgtgtgtttgcaaaatagaggcttccctcggatcttcaagggcagattcaggtaggaaggagtgtggggccacatgatcccgaggcactgctcctttcaattttaacttctggagttcagaggttgggagaggtgtctgattttgcagacttattttctgggtcaagccagggtgagcagtttgctttcttgccacttgtttctgtccagaggctccattttgggagggagaatcttgctgagcgggcccagggaagaaggagtagcagcttcgggtaaaacattgcttagctcccagcctactccctctgccgtcagaagccagtgggactcagctaaaatctctagggttgaaggaactgacggcaaggcctaacggagtctgcatctggagaagacaggtgccacagggaaggaggctagtcctaatgatcaaggctgaccctagaggccagattctgggtgaacttgatatggatgaggttgggaggatggctgaaatggaaagtggtcagctgcctttgaaggggaaagaataccaagcaactctctagtgctggcctgtctaaacagtggagccctgggtcacatgtggaatttaagttcaagttcattaacatcaaacaaaatttaaaattccagtttcttagtaacactagccacatttcaggtgctcaacagccacatgggactagggtccaccattctgaacagagcagatatggaacatctccatcatcacagaaagttttataggacagactgttctagagaactcaggcccaagggccaggaagcctggggataggtggttttgctgctgaatttttgcagaaaatcactgaacacactgagcctaaattagttcatcttctaattgggaataataatattgggatgtctacatcacagaggattccattaggacaaatgtctgtgaaagcattttgaagtgtgtgattgacatttctatcttagggatgatattatgaataaatttggatttctttcttatatgctctattttccaaacttcaacaacaaatatgcacatattttaaaaaagaaggcatcctctgaatacacaagtgatatatctgtaaaattattgggttacatgttctttctctgagaattagcagatatttaattattgcagaaatttgagtccagcctgatttctcccaccccttatagctcacttgaattttttgcctggatatccataaggttttttaattaagcttcaagtccattaatgttaccacaatttgtcttggtgttgatgagtgtccataagctgtttctggaagacagtaagctctttcaacctgcatatgttttagttttggagaaatgttcttctattaaagattccaatattgttttccattttatttttttcttcaggaacaccaattatgctgatgttggatttcctttgtcttccatactaattgtttttcatccatcctttcttacttttccacttcattttgttcaatcttttttagcctgtatatcatgtctctgattatgtttttaatatttccccattttgctctgtctgatacagcctttataacagaatagctttatttttctcttccacttacttcctgagtgctgttttttcacccccttctgcttcttaatctctcttctttgccctttttgtttcttattttgagatttgttgtaggcaggcaatttttaaaatacatttcaccgaaaaatatctgtccgatagtttctcccacttcataacacaaatcttctagtatttattctgtttttctcctttctattttatgtttcttccctttttatttctcatgctctctttttggcagatctcatgttggctacttattacagaattgcggtcattcttttaagaccggttctttgttggaggaaagtgtggggaaaggggctggcccacaggtatctaagcattggctctgttgactatctcagaatgctttctcatcaacatggacccagaacatgcctctcctctaagcaagggggagccccttactcaatgcgaagacccaagacggtcacagttctttggtgtctctttagcatttatgtttgtttgactgacagagagagaaaactagaacctttacagccatacaggtgatcactatccacaatctctctcccatgtgccattccaacatcccgcttcatgacaagcgtcttggagcctcctcaatcagttcatctgaatgctgtactgtcacatacatctcaggaactctcccttctctgacatgcatgctccaggctttgccagtattaggaagtgtcagagttcaaaaacacttcagaactcctcgtcctgcccacgatgtgcagaagcatgcgccactcttgatttccttctgcagtttggtcaaagtttcctgccattgtcagctcttcttcatatgctggcgaggtgggattgtggtctttccttctttcatcaaagatggcatattcttctccttttgttgcttttgtggttgttttcagagtgcttcagaaaggtgaatggaataaaagtctttgttctactaacttaaaccataagtgcctcccacctagtaattctgtgatcagaaagtgctgttttcttttgcatatctgtattttctaatctttctacaacaaatatgcacagttgaaacaatatgggatttggaattaaaggagcctgaattaaagacccgattcttccacattctagctgttgaacctgggcttgttaactctgtttaccttcagtttccttgtgtgctgtagacatatgatcataccatctcccttggagagatggttattaatataaggtaaccactgacccagtgattgatacatacagtagctcaatacatatgatatattgttatgttgtattaaataacattgttattaatagtacaattagatcaatttcataaagctgggcttcaaaaatactgtacttaaaatatgagagtcagaatgaagctgagatcatttaatccagtggttctcgacagggggtgattctgtcccccaggggacacgttttagtctcacgactggtggagggtgctcctggcatctagtgagtacaggacagagatgctgctaaacatcctgcagtgtccagaacagccccctacaataaagaattatttgttccaatagggtcaatgtccacagtgctgaacaaagtggagaaaccctggtctaatctaacttttagtacatacaatggaggaagtggttgtcccaagaaggaaagtggcttccctgaggtcacacagtgagtcagaggtagattgtgcaagttaaggccatgctttctcttagttcattgaaagaccattgtgccctgggctttatcatgcagcaggagttgggagcagggctgccatgtgggcgaggctcacgcgtgaccctgagtgagctcctccttcaatcttgctctccaaatgcctcatgtggccaccctagtcctagccttggtccccaactcagccccgctcacacccacccaacccatacataatctccaaggtctggctttcttataggaagccttataatccccccaccaaagaaatcccagcttctcaggcttagccaatacacgaccacagggattaaagcctgcaagcaaaacgcgcaggggtgagagacgggtggagagagagagaaaaaaatgccatgtcaggtggttaatttttgagctggggaatgatttccaggcatacacaaggcaacttttttcctactgccccccaacttgccctctttgtgtaggaaaggaaagaaagagaagtggtctgttctccaggaccctggggcaggaattttcaggacactgcctccaccaccactgtccccttccccctgccccagctccctgctgggctgcagctggcatttttgtcagggcactgggcagtgaccaggctcttggcagatactggtagctctgtgccaggcagagagctggctggcccacactttggggacaggactgagaccagctgcccacagcagtgccctcctgctgcctacgagagtcccacttctcaggagtgtccagggctggggctatgaagtgctgaactttgcactccagcaaggcagaagcaagccttaaacctcatggtatcccgttgcccaggactgagcctgcgaagtgccagaccctctggagctacatagtgtttgaagcatcatggctcaggcactcaggactggtgtcgcttcctcactccgagcgtcagttcactcatggataacatgggaatgacggcctcacagaatcaccatggtgggacattgcctggaagaaggccagcccccaagggggaaaaaaaaaaaaagctgccaggatcaggggaaagagccatggacagggagctgggacctgggggttataatccggacctgatgccaagaagcagagaagcctatgggttatgagcttggcatccagtgccagattgtctgggttccaatcctggaagtctatagcttccagagcagatgacttaactttgttccttggttttctgtaaaatgagggtgatgataataatgatgataagaatttcaacctcatagagttattgttggaaggattaaataagttcacgtaggtaaaaggctgggtgcaacatatagcccagagtaatctctatctctctctctctctttcttcctctcactctctctctcccttccttcctctctccttttctctctttcaatagatagatagatagatagatagatagatagatagatagatagatatatctatctatctatctatctatctatctatctatctatctatctatctatctatctgtttatgtatctatcatctatctatctatcatctatctatctggagatttacatatttaatgttacctactactggcagctgttattttgttacattccttgccctctttatgttagaaggttcatcccaatgatccataagctacttcacgtccaccatttggggatgaaggtaacaattccagttcccacatatatacggaccccaaagggaaagaaatttggagcacacagagcaggcccagggaaaggacccaacctggaaagaagagacagaacccaagagaaaccctttctgccaaggccaagaagcacattggcatgagacctccacttggaaagaggaggttaaatcaggcaggtgaaggctcaggggaacaaggccactaggagtcacatagcttgggtgcaaatctcagctccaccacttataagccaccagcttcaggctgactcattggctttttggagcctccctgtctccatccgtaatttcggatgcatattaggccatcctcagagaatgcccaggggagatcaaaaggcaggtggacatggctatgctttgacagtcctgcaatatgggcatttctcccccagcctctggggcaactctccctcatggcctcagtgccataccactgctatctgagatagctacacatgttgagcccttactacacaccagacactgtttggcaattcccttgttaaactctacccactgccctgagaggcagcaataactactgtttatgggtggcttggtttattgtagctcagagaactcaagtgacttgctcaaggccctctgcctcaatgcaaaccatagacaagaagaacaaagcaactatcgattgagggcttactatgcttaggcaccaagccatgctttttggggtgcattagctcgcctgtgtgtcccagtgaccctgtttagaaatgataaagcacacagaggtttggcaacttctctgcccatgtgtgtacatctagcaagggatggagccacgatcctaccatggtggtctagcccagggccctagtcctgatcttatgggccctatccccacggctcagcgatgaagattatagtggagggagcagccagcatttactgagcacttactatgtgtgagtgctgattaaagccctttacagtaattgtgtcttcagctcttcccaggctctggtaggttctagtagaggaaatgaaaggacaggcactcaacagaaggtgcttgataggcattttcatatcctctctggggggctaattcagtcttgagggtgagcagaactgattttcgtgtgcccactttccagagggagagactgaggcatggaggattaatccagaggtgatgcagatggaagtagttgaggccaccgggaagtcttgcttctggttgccaaccgaggctccctcttaccttgtcccatgccccaaaacactctgagacagcagctaggggccatctgtgtccatctgggcacaagactcaatgggggaaacagaaagggcagcaaacctgccccaggagatgcctgagccccgcccccaacccctcccctacagtggactctgttagacccctggactcattagtggatgttgtgacaagttcaagttcttggagccattcattaaaaacgttcctgcggtggctcacaccctgtggctgcccaggcctcactaatcattcacgagccagacaggagggtggttgtgggggtgtgccctggatgcaggagctcctggtggcctcactcagcctgaggagggtagaacacgttgttctgagaaaataagctgattcatggtgtgaccttgggcagctccgtcctctctctttgcctcagtcttcccaactgtccagctggttccttcatctcccatcatggagcggcatggtggggtgcaccaaaagctcccctcaggccccctctatgtcccttttcccctgtcatcctctcccgcacctttgcagctggtgctaatgggaggcctttctccaggtgaagtgaaaccctgcccgaaggcactggggtgggacgagcctttaaatcccatctgggctcttcattttagtttttctgtgaccaggggaccaaggatcagtctcctggaaaaggctgttatgagaaccaaggaagaccacttgctgtttcttggacacttgccatgctcccacccttctttatgttagaacgttattcccaatgatctgtaaaccactttgggtctatcatttggagataaaggtaatgattccaggtaccacatatatatgggacccaaagggaaaggaatttgaagcacacacggcaggcccagggaaaggacccagcctggttagatgagagagaacccaagagaaaccctctaccgaggccaagaagcacagccgcgtccatgcaaagtgacttttgcacttgctgttccctatgcctggaatgctcttcctttatagatgctcagggcttgctccttcaccttcttcaggtctttgctcaaatgtcacctccttttggtatgtgttcaatgctcccttttccaggacaccttccggactctacaattgcactactctcatccccaactccctccctaccctgcttttgttctccatagcagttatcatcatgggacctactgtcagaggcgtttgaaccagagtgactccatcttgaacaggagctggggagaatgaggctgagacctgctgggctgcattcccaggaagttaggcagcctaagtcacagaatgagataggaggtcagcaggactggtttcacaagatacaggtcacaaagatccaattcatgaaacaggatgcagcaaagaagctggccaaaaccaagatggcaaggaaagcgacctctagttgtcctcactgctcattatatgctaattctaatgcattagcatgctaaaagacactcccaccagcaccatgacagcttatcaatgccgtggcagcatccagaagttaccctatatggtctaaaaaggggaggaaccctcagtttcaggaacttcccacccatttcccagaaaactcatgaataatccaccccttgtttagcagatgatcgagaaataaccacaagtatgctcagttgagcagcctatgccactgctctgcctgtggagtagccattcttttgttttttcacttctctcataaattcactttactctgtggactcaccccgaatccttacttgcacaagatccaaggaccctttcttggggtctgcactgggacccctttctgccaacaatactatagatcttgcttatttatccctcgctagaatgtcagctgcatagctgaaaggatttgtgactgtccggttcactgtgactgtctgccatgtccccctagaatagtagctggtacctagaaggtactcaattgaaattttttgactgattgtattagtcacttgtgggtagcacctggcacacagggaacactgaggaaatatcccttttgattccataatcattcaggacacgtggattaagcacctgttgtgcattggtggacaagatggacaaggtccctattaacctctcactatttggagggcacttttttgttttacaaagcacctggttcccctggctcctcatcacagccccatgaggctggtgggcctgtaggacagatgagaaaaccgaggctggcaagggaagtgcctggctttcacctgcagggaagttcttggccaatcttggctctgtcctggatcatccgagcccacattctgtgctcccactgcttcttgggccctgggctctggcccacccttgacattttttttttctttttttcttttttttttgagacagactctgtcacccaggctggagtgcactggcgtgatctcagctcactgcagcctccgcctcctgggttccagtgattctcctgccttagtctcctgagtagctgggattataggcgcccaccaccacgcctggctaatttttgtatttttagtagagatgggatttcaccatgttgaccaggttggtctcgatctcctgaccttgtgatctgcccacctcagcctcccaaagtgctaggattacaggcgtgagccaccgcgcccggcctgacattttcaattctcttatgtttaccatcatcccagctccacctgggtccagctggtcctgccccaggcatcctgggagggggcgcagttgggaaaccagtgagtgaaggggaagctggtcctgggggaagccggccctgctggaaaggcccggcctgtttccaagccccttttgacaatgcgcctccactgctcacagtccctcgcttctcaggcatctgggacttcgggattttggccaagaataagaatgacaagggaactctcactgagatttttctctgaataagcatcatctcagttaatcttcccagcagcccctaggagatgagctttattccattttatacaggaggaaatggaggctcagagaacccaagaacccacacagtgagtaaagggaggaggtcaagaggattcaagaacaaacctcatcccctataatgcccttccagaccccagggccaagaggtcatttgtaaggcaaacaataccactacgactactactgacaatagcaaacattgacctagcacctgttctgggccagatacacccctaagtactctgggcatgtgaacccatcatcacaacattcctatgagttaggcccgatcagtattttcattttacagaggaggagactgaggcacagagaggctaagtaacttgcccaaggtcacacagctaggaagtgggagagcaaagctggagtccaggaaggctggtgctagggttcatgctctcatggtgctgtccctcctcctccatcccccaggaggtgattcagggggacataccaccccaggtgaggcaggctccttctctaggaagggaaagccagggtctggagaagtacaggttccatatcaagaaaaaagtcaggagcaggaagcggttgatgtctggtttagtgggggtgagaatgtcctctcagaacaggcctcagtctcccctatcaaccccaaagaaaggtgagagccaggccttggcaggactccccaggcctggatgtcccacgattctggtcccagacactggcagagcaggactggctgcccagtgaggagcccatacctgcggctgggcactctgtggtgtaaaacgcccaactcaggcaccatgagaagttttgctgactggttccagccctttccagagaattctgagcggggccacaggctggggcagggattggttaataaaaagagctggaagaatgttcctttgctctgcccctcacccctaggcccccagagccagcactttcagcttgtcaagagagaaaggtgcaggaggcatggtaaaacccaggagagaagcggggccgtgggcggcggcgaacaagggcctcttttgttatttccctagcaagggaaaggcggctgtcctgactgctgcggacagaggggccgtcagctccgtccagtgaagcctggagctggcctctgagaggccctgagggcaggagtgcctttctcgtgcctggaatgccctgcatttccaaatcctctccttcctgccaggccctctgcctccaggctgtgtgctcacaggctagcatgcccctctttaggcctcagtttcctcatcagcaaaatgggactctggaccatgcctgcctccacgtgtcagagagatcaaaggaactaatgcatttggggcagcggttctcagccttggcaccgcggacatttggggcctgaggattctctgtggggggctgtcctgtgcatgggagggtgtttagcagcatcgctggcctctacccatcagatgccagtagcaccctactcccactgtgagaatcaaaattgcctccagacattgccacatgtctcctgggagcaaatttgctggaagactcactgatttaaagcatatcctctaaggcctgcgacacagtaggtgctttgtccctgaaggtagccaatgtttttttagctctctacaaacatcatctattattatcatacccatttcacagatgaagaaactgaagcacgaagaggttaagtaactggcccaaggtcacacagttggttaaaaagccaggactggggccaggcatggtggctcacgcctgtaatcctagcactttgggaggttaagggcaggggggtgggggtgaggggcagatcacctgaggtcaagagttcgagaccagactggccaacatggtgaaaccccgtttctactaaaaatacaaaaattagcctggcgtggtggcaggtgcctgtaatcccagctactcgggaggctgaggcagaattgcttaaacctgggaggcggaggttgcagtgagctgagatcgtgccactgcactccagcctgggcaacagagtgagactctgtctcagaaaaaaaccaaaaaaacaaaaaaacaaaaaaccagagttggaaccaagcagccgaacccaagctcctccctccactgcctgatcacttgtgttagttcttgtctccataaactccaatcttcagaaagccctctgagatttccaaactcccactccagtgtctggatgacatcactgtcctctgggaagcctgtcttgatgtcccaccttccccatccagcacaatcgctcccttccctgatggcctccactgaaccacaaaagagtttgggtttccaatgaggcagacctaggctcaagtgccaaccccactattttgtcaatggctatgagatgctgggcaaatggcttaatctctctgagcctcaacttcctcatctgtaaaatgggtccatcacctctgggtcatactgcatggctgagaacacagaccctggagccagaatggtgaggtttgaatcttacctcggccacttcccagctgtgggagcttgggcaagtgagggaaccactcggtgcctcagtttcttcgtctgcaaatgtcagtaataacacaccagcccacagagccacagtgaacataaaaaagctcacaagcatatcatgagtgcttagaaccatgcctggcacttagtagatgctagaggtgctggctgtggctcttttgaagtctcctcgggggacagaggagagtgcaagaataaggcatgtgatgtggcccaggacatcaacaaagctgaggtcacttcctacagcctcccaggtgtcggcactttcttgtaggggagctgagtacagtggaaatcgaagtcctctctctgcgcagagggctggtaaggtcctgcaggagagtagagctaaaagggtggggaagggacttcaccaggttgaccggcagggcaggggcttgctggcctccccggctctgctccaatgtctttttctagctggggctcactgttgtgttctgcctatgggtgctcctaccagcaccacaggcaccttcccatggctgtccctcttcgtgtgaatttcaaggacaaacaaaaagagcagagagtctggactctctgcagataatagcaacagcagcaatcctttattaagcacctactgcgtgtcagcacctttgagccttcccagcaggtatcattatgcccactttgcagatgaataaattgaggctcaggggagggaaatcacttgccgggaagtggtgtgacctcatgtggctcttcccaagtccccagtgcatctcagctgaaaaaagcagtttggacacacgtgtctgacttgttccaggcccgggccaggtctgcccctagctagggtgctgacttcgtgtcttcaaggtctggcggtgtcagagaattctgctcatcagtccagagagcactgtcctgttgagttgggtcaggaaacacgatcttgctccctgctgcatcactggaagtcacgccagcctgtttacacacctggcaggagctccgggaaagtggaaagttggctggacctcagaggaattgttctggggtcagcgggtctatgtgcccacttgagggatggggcaatgggtcaaaccgggtagggagagcatggaggggcacagatgagggatctgggtccactaggctgggagaggttagcaaagtctctccagtccccttctgggcctcagtcttcccagctcaaaatagaaagggctggaaaccctgattcctgctcaaacgttacgcaaaccaggaagcagtctggggttttagaccccgtacaggttctgaaatcagaacttgtgttcaaatccaaattcatggaatgaatactttttcactgagcacctactatgtgtcaggcactactctgggtacagggctgccatagagcacactataagcataaacctgctcttaggtcactcacagccaagggggagaggcagacactagacaaagaaatgatcatttcagatcaggatgaatgccatgaaggaataaaacagaaggctgttttagagagtgatttgtgggatgaagagggcaggtgtgcttgagaagcaggaggacttctaggaggaggtaccattggagccaaggcctaaatgaccagaagcacccagctgtggaagatctggggcaagaatggtccagggaagcaagtgcaaagggcctgaggcaggagcaagcttggcagctttgaagaaccaaaagaaggcacatgaggctggggcacagtgagaaaagacaagggcaggggaagttgtaaaatcaggttttctaatttctgtatttgaggctctgagaccctggagggactgccccttcccagggctagcaaattcctagaaagaataaactactagcctgcaagcattccttcatatgtgaaacaaccaatcgagaccccatactccctaccacctctttttgagggatctcacatgaatccacctgccctaatcaccccagagccaggtacaagacaactaggggaagcccctatgcccccagacccactgaaatgattcaaactaactagccagtcctaaacctgcacaccctgccttgcccgaacatattgcccacagtaaaggctcatgcccacgtttcctcttattccctctgcctcccgacagaccctgctgctcccctgtgtggccctgtgtggcatggtatgcctcctgcttctagggccatctgagtataaaaacttctttgataatgctgatttctgtgtctgtgtgtttatcatacccaaataaaacaaattccattaccattaaaacagacacaaggggacaggtgggcaggagctggatgacacagggccctggggccacagctgtgagcatgggtgtcattttaaattctactcaccagctggggaccttgggctacaacactgcactgtgctgaccctcggtgcctcctcataggcctcccttgtctggatgttctaagcattggctgcaatgcatgtgaagtacccagcataacacctggcgcttagtaggtgctcagtctatggttgcttttgccagtttctgccctcctgggtcgctgtgcactggaagtctgcatctagagttgggaagatgactccttgccctctccccctgctcaggactcttcctgctcctggcctcttgcgcttcccattccccaggagcacccttccttcctctcttcatcttaccacatccagtccaagcgcaaagccaaccagagacaagaagccttcccagcttgtcagcctgaccccagagctttacggtgagtcacagcctgtccctgtccctggattgccaacctggctctcgaattagcctctgattattcccggagtgtccagggtcagcaactttctgcaggaggcaaagggccaggggagataggcgacagcaggagtctggaagtcagcctgagaaccatctgccgccatctgccgccatctgccagcctaatgtgggcaggggtctcctcctgtctgcacgtgggctcttcattgggcaaatggagagaatcgtagtagctccttcttggggtcatggtgaggattaatgagaaaatgcatgccaagaacttagcacacaactggcattctttctttcacttattcgagacatacttatgagcacctactatgtgccaggcacggggctggcaccaaagatacaatggtaagcaggacaaaaaaaaaaatatccctgcccttgtgagcttataccccatgggtgggaaggggggaagggggttaatatagataatgcaccagcagatacataattaaaacataatacgttgccaggtagtgataaagaccgtgaagaaaaataaggcagaatggagtgtaaaggatttttcattttctattttagatagggtctaaagataggggcagggacggccttttcggaggtaagatctgaacggagatcaatgaagggaaggagcaagacttgcggacatctgggagaacagaggttcagaacgagggggctgcaagtgcaaaggtcctgggatgagagcaagcttgggatatttaaggagcagtaagaaagccagagcgctgggagcagagggcatgagaggtggagtggggttggaagatggatcagcaaggaaacggggaccagaactcctaataaacatacagtaaacatgagctgtccttaacctttgttgagagctagctacgatctgaatagaaataagtgaacttgacctctgacccccctcacctgtcatctagaagttagctgtcaagagattaaatgaaatgtctttagcataaaacattgatgaggccagatacagttgctcgtgcctgtaatcccagaattttaggaggctgagaggggcggatagcttgagcccaggagtttgagaccagttgagtggcatgactccatctctacaaaaaatacaaaaattagccaggcgtggtgacgtgtgcttgtagtcccagccacttgggagactgatgtgagaggatcacttgagcccaggaggcagaagttgtagtgagccgggatcatgccactgcacaccagcctgggcaacagaggaagaccctgtctcaaaaataattaattaattaaaataaaaacattgatgaccaatgcctaagacagggtactccctggagagggggatggaagtgctcatctccgccctgcccctcactgaagcctttggaaaattcacttccttttctgggcctcagtttcctttttgtgggggttaaactagaatgagcaccagtttacgatggcaactgtaatattaatagctgacagttactaagtgctaactataagccagcactccagtaagtgcctcaaacatatgaacccatttcctccccacagcagtatgaggttgaacgatgattagacccaatctccagatgagaaaactgaggcacgggactgaccatttcaacatagtcctttgcaccaaatgctaccagcatctcccatttttttttccaaatcaatttcaaagatcccaaccagaaaagcatgtgtaaaggttaaattgccaaaaaaataaaataaaatgtacatgtcctctgagacacacattttgcatgtatgaacttatttattcattgtaaaatcctgtgaagaaaggactgtggacatttccatttttcagctggggaactgggttcagagaggtgaagacactcttcctgcatcacactgctcatcagggcagaggctagagatgaattcatatccaaatgaatccaaagcctggaacctttttgaccaagccaggctctctcctgaacaccagggtttgcatcccaggaacatggggcccacatgatgggacccatctgggaattatggacaattgatgcatcaaaattcagagggagacatggggctaaacttcccagccgctcctgggagaaccagtctggtggggtggttttgccatgtattcatcttttcttgctgctgtaacaaatgaccccaaatggagtggcttaagaaacacaaatgtattcttttagagttttggaggccagaattctgaaatcattttcactaggctaaagtcaaggtgttggccaggctggttcctcctggaagctccaggagagagaatccatgccttgcctgttccagcttctggaggccacctgcattcctcagctcacagccccacatcacattgctttttctccctctgcttccatcatcctattaccttccgatttcaacttctcctgcctgcctctcagaaagccgcctgtggattacatcaggtccacctggatactgcacaataatctccctgtttcaagatcctttacctaatcacacctggaaagtcccttttttccatagaaagtaacattcactggttcaggggattaggacaccgacacctttggtgggtcactattcagccagccacatgcccgagatttcctttacttaacagctcaccaagcttcatggtggcaagaaggccatccatgtacagatgaggaaattgaggagctggggctatcagtcaacctcagcatccccagacaagacacgcttccaggctatgggtccagtatttcttgaagcataaaaagccaactccagaagactttgggtggaacaatgaggttacctcccttctaatccttctttccttctcattatttccaaaacaaagtctcagtttggtactagtttgtctttaatgcctcacttgatgatatccctccccttgcaacaaagagagggcagatcgcaggcccatagcttcaaccaggcagtatgtacccagtattaatcagcgttaaatatttacctatcaattgctagttttcttctcctaatcatcagtgatgatcctggttttccatacatgatacccacagaaaatctccttttaaagtcattgcatttaagtttttttaaaaggagagggcagtaagacattaatgtaaaaagaataacaggaatgtaattaagtaaataatattgagtggtaagggactctggcaaaaatgatgtgagtggtatttggatgatggaaaccaaaccagattcactccattctggggtgcatgggggaaaactccctgtctgagctccctgaggctcaaatgagatgatagaaggtaaaatcagcaggcagtgtctggccagagaaggtgctcaatccgcagagctggacttgcagtttttttctggaaaacctctgttggggaaaactcaagggcctctctcacttcctggccgctctcacttccaaaatccaggactaagagagaaggaggaggagtgaccgaagtagtgtttagtagctgtgtgaccttggaatttaacctctctgtgcctcactttcctcatctctaaaaatggggataatttttgtttgaacttcctacatctgatgtgaagagtaaatgagctgaaatttgagatgcatgtaaaacagcattttgtaaatgtgagaaaatctgtggctattgctctaattataaactcccactatatgctgagcaccactctggacacctcctgtatcttcccctaattctcgtaacagaatgagagggtgtgagtcctcctcacttcacaaatgagactcagcctcagaaattcaaggtttccagcccaggctcccctcttcagagccagacacaaatccaggttttctcaactctaaagcccatgttctctccaacatttaacttctctgagcctcagtttcatcatctgcaaaataggagaactaaaacatattttcagcattaaataaaaaactaagaatttatagtacaggcacaatgtattaactcactgtggccagaaaataactgggaaagaatataatattatggctgtgttataaatgaagaaaccaaggccagaaatagaaaatgacttgcccagcaagtatgtggaatgcgaatgcagttctgattccaaagcctcaaaactgggaatgaaaggaccatcttcctggtcatctacctgcccacaaattaggcaaatgcaagaaagggggcctctgaccttacaggtgtactaccatcccccccaaatatctctatcccagagtaagtctgctgttggccaccgtgacacctttgtgcaaattagaataaaaggcccttcctcaggtggatccagctgtgcaccagggtgcacagcttggcatgtggaatgcaggctggttcagccttacttgcctcctcaagcaccttgtgcagtgcacagcttgcacaacactctgtagcagccttgccgagagcatccccaaactcttccttctcagagcatctttagagtcacctgtgagtccccagtgttaagaactcctcttggacaggtggtcagtatcatttaatttgctctcagggggcataaggcaggaaagggggtaaggcttctctgcaaacaagtggggctggagcttatttgtaagcctgttttattaataagagtcccatctgtgcccactagctaagatcactccccaaacctctaactcgcaggatggccattcttggaaaacgttgatgtagtccctggggtagcatcccaacttcctgagcccccagcactcttcatagcaagagctaggatccccagtggtgctggaagcggcagccatgcattccagagctcatcccactccttttcatccctgctgacagcatttctgagccagaggacataatgtaagaattgttccttccagctctgctctgcagattgactccagcctccccgaagacaagctcaccagtcaccaggaacaggtgcatgaaaaccaaccctcttaacacacagactcctagaacagcaaagcagcagtggacagatgtcatcaagctggaaacccaggccccaaagaggggttgtctcctactccacactgcctggtaaatgacaaataactgaacatctccaacttctttcctgatgtgatatctgcagtttcgcaagttgttagtgatccatgtatacaatacaacctgcattcatggcgccagaatatccatgtggaagaggctgagaagtgacaatctgatgttggagtggacgctgaggacgcctgtcttgaattgcccagcaagcatgttttgaagttagtccaccagcctctgtttggggaggctctcacagggagtgactggtgaagatgaccagaattgtcttgaagctccatgtgcataacaaacctactgtgcttgctttaacccatgtcccgttttgcaccgagaatactgcactggcagtgagctgcactttttttttttctaaatgggaaatggattaaatgtgtgtcccagatcaataaagatgatgatgttttctaaggatacttcttattcgcattgtatatgaaattgagaaacacgtctgttcttaatgtcagagaatctaataatgacaatcatataaatattgttatatgggagaggaggcttcaggtatgccaacagagattttgagggaggcgaaggtcctccaaagagccaggcctgcctcctgggaggaggccctggttcatcaaccacttaaagaggcagtgacatctagagccatataaagggtccccacaagggaactgtagggaacaaaggggtggtttgtattgaattataactaagaagagcatgtaaggcacagcagttagaaagaagtacagactcttgcctgtaatcccagcactttgcgtagccgaggctggtggatcgcttgagtctaggagtttgagaccagcctgggtgacatagtgaaaccccgtctctactaaaaatataaaaattagccgggtgtggtgacaggagctgatagtcccagctacttgggaggctgaggcaggaggatggcttaagcctgggaggtggaggttgcagtgagccaagatcgtgccactgcactccagcctgtgttacagagcaagaccctatctctctctctctctcacacacacacacacacacacacacatacacacacacacacacacacacacataaaggagtacagactctgcattctggctttgcagcagctgtgtaaccttaggcaagtcacctaaccccgctgagtttccgtttcttcacctgtcaaatagggatgcaaataacagctgcctctctggttgttgtgggcattacatgggacaagcctgacaagctcctagcatggcccctagcacatggtaagagctaagcactcaataaaacaccttcttcatcaggcttagcaccatcataagggattagttacatcccaggggctctccctgttatctctccctgctttccattcagttgtgcatgttggagttcagataggaagaggatcctttgtgaagctcaagcttcagacctctcccaagcctcgtaccgaatcctgtatttgtaaatctgtattcattttcttcaagagtccccctcaagtagtaaatgctccccgccccttaacccttggatctgctcctgggttcatgttcttgctagagaacagagcagagagaagctgtcgggacccctactgagagaatagagaccttgtgttttatctcttcttgccagagagctctgcctatggcctcgcagacagcaatcagtcaaggctcagccacccacacttccaccaaagatgtttcacaaagccttactcaacctctcacatcaatcccagaagctagcggtgtaatcgctccacttacagggaagcaaaacccaaagaggaaaggagattggtccaagatcttaagatccacaggtcagaaagtggcctggggtgggctgagttttgcaaaggtgacctcatccttcttccatcatttattgtgtttttctcttccacgtcgagaaagtctaatagcttagataattccacactaatgaacttgctgtgtgttagccctgggtctccttggaaccactggtgtcaccttcttactccatgtgcccaaggagggctccttcttccaggagaagctccctggtctcagctgatcggtgctgggtaatgcaccactaaattatacctcctctttacttttatttttgtgaacatttaatacctcactgagagatggtgaagcaacttcctggaggtagaagccttatcttacaagcccagtgccctctcatgatgccctggctgggctgggcagggcacaggtgaagaacccaaaagggacctgtggtaccatctccttccagcccccactagtgttgatttcagttatgactcctgaactccacctgcggcctttgatcttacaggggttacttccttggggagactgaaaacagctagggttctggattctgacaagccggggactgaataccgacatagtcacttgctgtgtgactctgagcaagtcactttctctccccgagccttggttttctcctctggaaaatgggtcaaataatctttcccctctgagacgcgttgaaatgattaaataaagtgatacacaaaaggcaaatcctcacccgtagtaagcactcatgaatcttaccgtcctcatcacgtaaggacctggtgcagaaaaagaccagtcactgcttattgggcatttattctgtacaaggtttagttataagagatttacatatattgcctcattgatattcaccgctgccctatgggtgggcactatcatttctcccatttttacacatgagtaaactgaagttcagagaggttaagtgacttgcaccatgtcacacagcttggcacccagtaagtgttcattgtgactgtcgcgtgaaatgtgcaatacagcaccaagcacagaattagagctcaggaaagaaagaattctgctaggcacagtggttcacgtctgtaatcccagtatatgggagaccaaggtgggagaattgcttgagtccaggagttccagaccagcctggacaacatagtgagaccctatctctattaaaaaaaaattagctgggcatgcacctgtagttctagccactagggaggctgcggaaggaggatcgcttaagtccaggagttggaggctgcagtgagctatgatcacatcactgcactccagcctgggtgaccggcgagaacctgtcactgaaacgaaacgaaattattcccatggaagtgagatccagaaggcagggtgggactcaagctctaaggagcagctgggaagagggaagaggcgttaggagcgttcacagcggtccgcggcaggtgcaagggagggaaggcgagggggtctggtggagcctgtctacactgggacctcagcggtctcccaacttggaggcttgggagaagaggatcccgcctgtggttgaccgggggcgcacaggcggaggaggcgttaccttgggcgggagggcgaagaccaccggcagcagcgcgagcggcgtgaacagcagcaccagcagccgccgcgcgctccacaccttcttggccgctgctgccagcgccgccatcagcgcgatcgcctggcggtacgggccggcccgggactgccccgcctggccccggcgccggcttaaagcctgggggagggtcggggaggggactgcgctggggaacccgccctctccctgctcctcctggaggaaaagggtggtgcctgcgcccctgggaccgggtgaaagaggcccgggaacgttggagaaagttaggcactagaattagcaaacgggaccccagccgcagggcagtgtggccttgcctcttggcttcccagcaatgtggcctggggcagctggcttatcctctcctcgcctctgtttactcgcctgtgagatggctgaggatgacaaggcgaggattaaggcgcgtactcctattacccgggttcaaatcctggcacggccacttactcactgcgtggccttcaacaacagcctctgagcctgaaagtggagtggtgataataatagtctacaccatggaatactatgcagtcacaaaaaagaaggacatcatgttttttgcgggaacatggatggagctggaggccattatccttagcaaactaacacaggaacagaaaaccaaatgccgcatgttttcacttataagcgggagctaaatgatgagaacacatggacacatagaggggaacaactgacactgaagcctatgggaggctggagggtgggaggagacagaggatcaggaaaaataactaatgggcactaggcttaatacctggatgacgaaataatctgtgcaacaaatccccatgacacaagtttacctatacaacaaatctgcacatgtacccctgaacttaaaagttaaatttttaaaaatagtctacaccagacaagaaggttgttaggaagtttaaatgagataacacatgtaatgtgattagcgcagtgtctggcagagcaggtgctcaatgagagttattgctgctgatgagttattcttatttttgggtttttttttcttttttttgagatgtagtctcactctgtaacccaggctgggctggggagcagtggagcgatctcggatcactgcaacctctgcctcccgggttcaagcaattcttctgagtagctgggattacaggcgtgtgccaccatatctggctaattttttttttttttttttttgtatttttagtagagatggggtttcaccattttggccaggctggtctcgaactcctggcctcatgatccgcccatctcgggcctcccaaagttctgggattacaggtgtgcgtcaccacgcccggccgttattcttatttttttttaaggggggtgagtcacttctattcacttctgattattctcaggtaaccatacaggagtgcaactgttgggttgcccagtatttgcaatgcttagctttttaagacactgtcaacctgtcttccaaagtgattgtactattttgcacttccatcaacaatgtatgaatcatccagtttctccacatctttgccaacatttggtgttgtcactgtttattttattttaaccattctgacagggacatagtaatagctcattgtggttttaatttctatttccctaatggctagtgatgtttaacatcttttcacatgctaatttgccatctctatatcctctttggtgaactatcttttcctgtcatttgcctgttttctacttgtattatttggttttttacagttgagttttgaaagttctttgcaaattctagatgtcagttctttgccagttacgctgtttgcaaatatttctccccgtctgtagcttgtcttttcagcctcttaactatatatcaccaagcaaacatttctaattttgatgtagttaaatttatcaaatttttcctttggatgatcgggttaagctctctgcatagccttagaccccaaagagtttctcgtatgtttagtttgctttgttctcacagaagtgtccaaggaagagaatacagtcatgggttcttagtttctgtttctggttgggccagtaaagccccttcctcatccctcttttccactcatcactagagacagaaactaaaaaccatggcttcaggctgctaaaagcttaaaacaaacaaacaaacaaaaaaagaacaacaacaaaataaggcaggttggacaagcttgtcagaagttttacagttttgaaacactgtattcattacaaaataacttcattctctcctcccacagcctctggaaaccatcattctgctttctgtctctataaatttgattaatctggatagctcatacaagcggtatcatggaatatttatccttttgtgattagctttgtgtccttaaggctcacccatgttgtagcatgtgtcataattcctttttaaggctgaataatattccattgtatggatatactatatcgtgtttatccattcatttgttgatagacattgggttgtttctaccgtttggctattgtgagtaatgcagctataaacataggtgtacaaagagtatctgtctgagtccctgctttcagttctgggtatatacccagaagtggaactgctggatcataaggtaattctgcgctttttgaaaattattattgagaaatggccatactgtttttcacagaggctgcactattttacattcccacgatgtgcaagggttccagtttcaccacatcctcaccaacacttattttctgtgatttttttaaataatagccatcctaataggtgtgaagtggtatcccactgtgattctgatgtgcgtttctctaatgattattgatgttgaacatctttccatgtgtttattggccatctgcgtatcttgtttggagaaatgtctatccagggccttggtccatttttttagcattttggtttttgtcacttgcatggcttttttcagtaattgctctaggtattacattgcatgtacataacttataagttataatccactggtattgccatttaaccaattccagcaaagcatagaaaccttacttcatgcccctttgccttacccagtttaaaatacttctttcaatattttctctacatacatttagaaccacatcagtgttttaacttttccttcagctatcaggtataatttttttttcttgttgacatggagttttgctcttgttgcccagactagagtgcaatggcgccatctcagctcactgcaacctccgccttccaggttcaagtgattctcctgcctcagcctcctgagtagctgggattacaggcacccaccatcacacccggctaattttttgtatttttagtagagacgggtttacaccatgttggccaggctggtctcaaactcttgacctcaggtgatccaccggcctaggcaacacaaattgttgggattataggcatgagccaccatgcctggccaagaacttcctttaatcattctttgagaccaggtctgcaggcaacaaattctcttagttttccaacatctgagaaggtcttgatttccccttggttcttatttttggtggacatagaattctgttattttctttgagcacttgagaaatgctatgcacctactttctggcctccatggtctctggtgaaaaatctgatatcatttgagttatttcttctccataggtaaggttcatttctctttctcttgaataaatattttccaagatttcttttttttgtcttatgttttgagaagtttggccatgatatgtcttggtgtggatttccttggtttaccctagcaatatttggagttcactcagcttcttgggtctgtagatttataatatacacatacatatatacacatatatatacacacgtatatacacatatgtatacacatatatacacatatatacacatatatacacacacatatatacacatagatatgttcattcatatatatatataccaaatatacatatatgtatatataagccaaaagaggtttaattagctcatggttatgcaggctttacaggaagcatggtgctggcatctgctcggcttctggggaggcctcagagagccaacatgtatatatatgtgtgtgtgtgtggtatatatataatatatatttttatatagtatatattatatatactatacaaaaatacagatatactacacaataatattccattgtatggatataccatatcatgtttatccattcatttgttgatagacattgggttgtttctacctttcggctattgtgagtaatgcagctataaacatgggtgtacaaagagtatctgtctgagtccctgcttttatacaaaagaaaataatatatatatactatatatatattttatacaaaagaaaatagtatatatatgccttcagtatatataatatataatactgtatatactatatatactatacagtatatattatactgtatataatatatatactgtacagtatatattatactgtatataatatatatactgtacagtatattatatatacgtatataatatactacagtatatatatacagtatacatatatgtatatatgtatgtatatatgtatatatgtatactacatatactatatatacagtatatatacatatactacagtatactatatatacatatactacagtatactatatatacatatatattatatatactgtacagtctatattatactgtatataatataccacacagtctatattatactgtatgtaatagactgtacagtctgtattatattgtatataatatagactgcacagtatatataatactgtatgtgatgtagactgtacagtatatattatactgtatacttatatagactgtacagtatatattatactgtatataatatactatacagtatatattatactgtatatgatatactatacagtatatattatactgtatatgatatactatacagtatatattatactgtatatgatatactatacagtatatattatactgtatatgatatactatacagtatatattatactgtatatgatatactatacagtatatattatactgtatatgatatactatacagtatatattatactgtatatgatatatactatacagtacatatattatactgtatatgatatatactatacagtacatatattatactgtatatgatatatactatagtgtatatattatactgtatatgatatatactacctattattatatatatagccaaatttgggaagttttcagccattatttctttgaataattttatgtcccactttctttctcctctccttgcataatttcagtgatacagatgttagctcttttgctgtagttccccctgtccctgcagctctatttaccttttcagtctattctctctctgttgttcacagtgggtaatttccattgttccatgtcccggttcactgatccttctgccttctccatttgctgttgaacccatccgttgtataatattcttcagttatacaattttcatttgattcttctttgtaccttctattactttgctaagtcttctgtttctttgctgaggttttctacttttttcgtttgtttccagtgtgacacatcactgtcatcttaatattaagcatcaaaagtcagtttgaccagcctggtcaacatggcaaaacctcatctctactaacaaaccaacaaaaaaagcttttgagaaaaagtttgaaaaaaaacttttatcatgatccgggacatcatcagagagcactgagcttgtaagatagggcttctacctccaggaagtagctgggtgtgatggcatgcttgtaatcccagctactcaggaggctgaggcacgaaaatcatttgaacccgggaggcagaagttacagtgagccgagatcgcaccactgcattccagcctggatgacagagtgcgaaaatgtctcaaaaaaaaaaaaaagtcagtgtgagaccttccacttgtcttatacaacaagtgactttcgtttggaacctggacattttgggtactgtattacgagattttggctcttatttaaaacttgtttttgctgacttctttcagtgctcttgcaaaggaaatggggatgtcacctcattactacaagacgaaagtagaagtccagttccccacctcatcctccattaatatctgaggtggggggagttgttaggccgtttctgcattgctataaagaaatatgtgaggctgagtaatttataaagaaaagaggtttaatgagctcatcgttctgcaaggttgtacatgaaacatggcgctgtcatctgctcagcttctggggaggccttggggagcttttactcgtggcagaaggcgaaccaggagcaggcaggtcacatgtccagagcaggagcaaggcgctggggggaggtgccacacacttttaaacaaccagatttcctgagaactcatatctcaaggacagcacggatccaaccccatgacccaaacacttcccaccaggccccacctccaacattagggattgtatttcaatatgagatttggacaggacaaacatcaaaaccatctcaggggggttcattactgctggggagtgctgggagttctagctcccatcagccctctcctgatacctccctggctagaggagtaggagtgccttgtctttgctccccatgtggcttccattgacactgcgggagggtggtgtccttgttgctgctgggtggtagttactttggaatactgatacatgcaacactctaaataaatatcaaaaaaaaacccattatgctatatgaaagaagctgaacataaaaaaaactacattctgcataattatatctatatgaagagttaaaagaggcaaacttcaattatagaaaccatatagtgattgccaagcaatgggggtcaaaagacaggatcaactggaaacagcatgaggaaatgtatagggtgatagatgtgttctgctgactgtggtggtggtaatacagttgtatataattattaaattccatcaaactgatcatttaaaataggtgaattttattatatatagttatacctcaataaagccagaacagaagtgcattgaggtcaggtgtggtggctcacacctgtaatcccagcactttgggaggccaaggcaggaggactgcttgagcccaggagttcgagaccagcctgggcaacacggtgagatcctgtctctaattttttaaataaattgttttttaaaagtgattgagtatatttagcgataaaaaatattcattggatcaagttggctgatcgtgttcttcaaatttagattcttaaagtctccaattcaattatggatttgtctatttctcactttagttctgtcaattttcacttcatagattttgaagctctgttattaaatgtgaacacacttaagattgttatgtctttattggtggattcacctttctatcattctaaaatctctctctttatcaccatagatgccctttgtgttgaagtccactttatctgatatttaaatagccacaatagttttcttatgctcaaagtttgtattgtatatcttttccactttttttaaactgtcaacctgtttctatatgtacaatgtgtttattctatacagtgtattgatgaactctgcttttttatctagtctaacattctctgatattttaattggaatgtctaatcaatttacatctaatataattatttatctggttggatttaagtgtcttattttgctattagttttctatttatcttatttgttctttgttcctctcttcctcctctcttgctttcttttgtatcaactgattatattttggtgcattttatttcctctattaattttttagcttttttctgttttattattttagtggtttctctagagattatgatatgcatctttatcacagtctacctttgcacaatgatatattattttaggaacaatataagagccttacaataatggtggccaagtatggttgctcatgcttgtaatcccagcaatctgggaggctgaggagggtgttgcttgagttcaggagtttgagaccagcctggccaacatggtgaaacctcatctctacaaaaaatacaaaaattagctgagcgtagttgcaggcatctgtagtcccagctaccggggaggctgaggtgggaggatagctcgagcccggggaggtggaggttgcagtgagctgagatcacagtactgcactccagcctgggtgacagagtgagaccctatcccccccccccaaaaaaaaaaagaaaaaacaaagaaagaaagccttacaataatggaaataatgtaaaaaaattccatttaccaccctcttctcttcctttgtacttttattgtctttttaaatttgtgtattctataaacccaagtatgtgctgaagataactcatgctagcttatgagaaatgactgttactctttcagaaaatttgtgagccagctgtagaactgatggtagcatgaaatcacccatagcaagaatatttacaccatgaaattaataaaattctataaataagggcttttcttccagcagccaattgttaaacatttaccagaacaccactgtttgaattacacaacatattgttttaattttataaacaatcaatagtctttaaaagacatgtataaattatataaataaaagataaatgtactttaaaaagtatttcatattttcccaaatatttaccctatctcttcacttcttcctgcagatccaggatcatttctctttcaggtgctagcatttcttttaccatttcttatagtgctggcttgttgaaaggaaattctctcagcttctgtttatctgaaagtatctttatttttgcttttgtttttgaagttactttcaccagatatagaagtctagattgacaattttttttcctttagtacttaaagatctcattccattgtgttcaagtttctattgtttctggtaagagattagccaccattcatatcattgatcccctgtaagtaatgtctggtaagaaattagccaccattcatatcattgttcccctgtaagtaatgccccatttttattctggctacttgtaagatctctttatctttcacttttcagcagtttgactgaaacgtttaggtgtagtgtttcccttatatttatttactcggagtttgctgagctgcttggatctgtgcattgatgtctttcatcaattttggtatatttcccgtcattatctcttcaaatacctcttttgccccattctctctctcctttccttctagaattccagtaacatttatgttagagcatttggtatcatcttacaaatttcagactctttgttctttatttttttcacttttccttctctacgtgtttcaaacaggcattttctattacctgtctttagtgattcctgtctttgttgtgcccagtctcttatagatctaagtcttcatttctgatgtagtatttttcatctctataattttcactagttcttttaatagtttccaggtctctgctgaagttttccatttgtttatgcatgttgttctttagattctttcatttttagaattttgttgtagattttttaagtctctgggaattccagaatctaggccaaatctgaatctgcttctattaatacttttctttaatgactgtcacattttattattgtctgtgtggttgctaatctttgaacgcattgttgacatttttgtaagaaagaacagtagagaatgaagtaaataatatttacctccagaagggggtactccccttttcctgtaaaaccgatagagtatggaattaaccagtcttacctgcagtatggagttaatcggttttacccgtagtatggagttaaccagtcttacctgtggttgaactggatttcagctttggtgcagttttagattgtttcagttcatcactggctccaaatgttttgagggtagatttagaacttttccttcagcagatctgagaccggagcactggtgagattttaggaatctgcctttgcttcccagaagagttacccagtttgggaatgttgggagttctctctcttgtgtagagccaagttgccatggggctttttggtcattggtgagttctctttgttctcaaatcctgccccccatttcctgcacctgggaggattttttcagcctagttgttgttcatctggcctttggagggctatggttctacacattttgaaggtctggaatgactggtaggggtgtcttttcactataagcttctgatagtcaaaagccaggcatgcctgggaggggagggaatctctcaattcttctacctcaggttttctgtctgttctcctgacctgttcccctgtgcctacttttgagagtgtcttatacttaagagaggccccttgctttcaggggaatccttcttatccctccttttatcacctgttttggtgtaatatcccgcacttgataaatcccatggtaagacttggtgggcagattcagacctattcagtgagtagagtttatctccattataagctacacagaagctctcatgttattgaaaatttagctggtttcttcctgcccatccatggcagtctcctctttctccagcagttgtgttaggatttggagcagctatgagtctcttctcccccattatgatcttggcatttcctcctggaggttagctcctttaggtttctttgtgtcctcagctttccatgaagtttttaaaactatgattttatagctaataaagcctattttgatggggtggtgttagagtgggagcaacagtctcttatcatttcctatactagaaccagaagtggaactctttccaaaaaaataataacaaaaacatgtttctaataatgccatcagacattgttgtagtctatcaaaataccaggaccattgggtcattcctgcctaccatgtgaaagtcaaagaatatttcatttgggggaaaaactcaagtctttcaagattaaactccaagtagaatacagagacttatgggtacccgatatagcagacgaaaacgatattacaaaaaggaagtaagcacctgctatagcagggaaaggttatattacaaaaaggaactaagcacactgctcaaacactctggatcattcaagatgaacctgaatcatcttgaaatatacaacaagatccaaaatgttctgatgagaagtcagccagttggtaactcagctcctataggcatggcatgtttgagacagcactcttttgcttttgaattgggtgagattaccaaatgctcatgaagaattttttctttgttgttgtatctaggaaggggtaaaaattagaaccttgcaaagttctgaaaatataaataagaaacaaagtaaattatatgagttcagcacttttgtaactgaccttggtgtgaagatatgaatttataagtcttatcagcaatgaatttgtgtatatttggtctgctgtttaatatgcttgaaccatttgaaataatctgcttgggggctgggcatggtgtgtcacacctgtaatcccagcactttgggaggccgaggtaggattgcttgagaccagaagtttgatatcagcctgggcaacatagtgagatatcatcgctgttttaaaataaataaaataaaataaaaaagaatcaccctagctgggtgcagtggctcacacctgtaatttcagcactctgggagactgaggcaggaggaccgtttgagctcaggagtttgagatcagcctgggcaacatagtgagaccctgtctctacaaaaaaattacaaaattagcaggccatggtggtgcacgcctgtagtctcagctactcgagaggctgaagtgggaggattgattaagcccaggaggcgaagggtacaatgagctataattgtgccactacactccagcctgggtgacagatcgagaccctgtttcaaaaaaaaaaaaaaagttggggggctttaccaagatttgtaattgcagtttatattgttcaagggaatttaatcaagtttgtgatctatgtcaaatgcaaggaatgttggctttccagcttatttattcgtgaataataatggccacactcactacgtgtttactccagttcaggtcctattctaagagctttacatgatttaattcattgaacatttaaataaccctatgaaataggttctattatattcccattttgcagaggaggaaactgaggtacagggaaattgagtaacttatccaaggacacacagctactgagtggggattcaaacccaagcaatttcactgcagagtccacatgcgtaaccaaccactacactgtaataactctagtataggtgtttattagatctgggcaatatgactttaatactgagcattgaacaaagtagcagtgagtatccttcatgcaccaaatccctgaaagtagtaatattaaaggagttgtcgacaatgtgagtgtattcactcaagaggctgtttcccaacactcattcccctcagataacaagggtgctacatgcacttctttaaacttctagcatgtggttctcaaccccggctgcacattggaatcacctgaggagcattaaaagtgctgatgctccatcctcagagtctgatttcattgtctagggtgtggcttgggcatcaggattttttttaagctccaagcagattctaaagggtagcttggattgagaaccactgtccctaaaaatctaattcatcctttgccagattctggtgaaacctgggaaatgtgaactggctttttatcacatcacgtctaaaggctgaagcgaccctcctgagttagtacagaatcttgacacccaacagctttggggcctgggcattggtctatgttagatgccttgtcaatgtttacttaactattaataatatttgaatacctaccagacttggttttgctcattagcaaacttgggattaatcagacatacctttcaccatgtgttttactcaatatttgctatatggcaaccatataccaggctgtatatacactaatgaataagactaaaaaattaaaatccctgacctcatggaacttaaatgatggcaggtgcaaataataaataaatgagtaaaatgtattataatcaaaagatgaaaatatgacaaatctgggaagaaaacacaaggaagcagcaaagggaagttgagagtggtgctttggaggtgctgttgtagataaggtggtcagggaagctgtccatgaagaggaccctaagttaaaccaagacctaaagaaagtgaacacatgaacttctgggtatacaaaggaagcattccaggaagaaagagaagtcaaacgcaatggctttgaggcagcaggcaacatgacaggtcttagcatcatcaaggaactggagtgcagagacaaggtcacagccagccagcaaggactcaaagtaggatcctgaaagcccaagtagggattttcacactcagtgacaagggcagccattgtagagatttaagcagagtggcatattctgctttcattttttttttaagtcagtgttactgagatatagttcatatagcatataattcacctgtttaaaagtgaatatgtcaattagccaagcatggtggtgtgtgcctgtagtcccagctacttggtaggctaagacaggaggatcacttgagcccaggatgtcaaggcttcagagagtggtgtttgcatcactgcactccagcctgggcaatagaatgagacactgtctcaaaaaaaaaaaaaagtatgtgtaatgtaatgatttttcaggacactcacaatgcaaccatcactacaatcaatttaacacattttcatcaccccaaagggaaatctcatgcccactaacagtcactccctatctccccacaacctccccagtcccaggcaactactaagatactttctgtctgtatagatttgcctactctggacatttcatataaatggaatcatataatatgtggtccttttgtgtctggcttctctgacttaacataatgctttcaagattcatctctgtcacagcacgcattggtactacatttctttttattgctgaataatatttcattgtatgggtgtatcctactttattattcaatcatcagttaatacacatttggaccgtttgaactttctggctattatgaataatgctgccttgacctttagtgtacaagtttttggacatgtttatatttctcttaggtacatacctaggagtggaatttctgggtcatatggtaactctatgtctaaccttttgaggaactgcccaactgttttccaaggtgtctgcactatttcacaatcccaccagcagtgtatgcgggttccagtttctctacatcttcccagcacttgctattatttaccttttttatgatagccatcctactgcgtgtgctttttatttcaaagataactcaggctaagacaatggtggcttggaccagagtagtaacagcagaggtggtaggaaaggattcaattctggatatactttgccagcagagctggtaggtcttgctgaaactctgatgaggctatgagagagaggaactggtactgggatcaaatgtgagatggtggaatatttctcaaagtgtgagaggaatactagtgaggaaacacagataattttatgtcaggcatttaaataacattgagtcacagaaagtgaaagttatcctgtgtcacttttcttcaactcctcattataccgtggagagagtctcagttgggtgtcagtatccctttaagacctcatcacctataaatcttcctttgtaacagacagaaaagggtttggagtcagaaacattgggctcttgctgagccaggcaatattgttttatttttattttatttattcttataactacttttgactgaaagagagtgattttttgttttggttttggttttgttgctttgttgttgttgttgttgttgttgttgttgttgttgttgttgttgctttgagacagggtctcactctgttacccaggctggagtgcagtcgtgtgatcacggctcactgcagccttgacttccctggcttaagcaatcctcccacttcagcatcctgagtagctgtaactacaggcgcacaccaccatgcctggctaatttttaaattttttgtagagatagagtcttgctatgttgcccaggctggtctcgaactcctgggctcaagcgaccctcctgcctcggcctctcaaagcgttgggattacaggcatgagccatcacacctggctgtgattttcatttttttattaaagcctatgacttttttagaaagctctctgtttaacttatatctatttaagtttacaatgtaaagcaactcaaagaaaaatgccaagtaacttggagtgcagggagtacgtgacaatggcaaaattccaaaaatttgaggccaaaatctgaaatttgggagactacgagatagcaagagaaagacccaggaaggggtgtggcactcacttcctatccagatcatgctgatgctgttcctataaacaccgagggcaagttatttcccaacggacccattccaagctatgatgaaactgtctcccatgacctttcaggttgggacttgatcctgagccagcccaataaccggcttcatcaaaggctccagacaacagtgtatggagggacaaaggccctccagggagcactttggaccttcaaggtctgggcatgggaggatggggtactccaaactggaaaaggtatttctagagaattggattcattgacatcaaaggaactctggtccatgccccaaagtctgagtggaggcagctgggaccagggcatattttaccggtgggcctgggttggattccctgttccagaaccagctaagagattaagagtacaatatttagcattagagcagaggtttcaatctggtggcccaaatgtagccatcatcataacaatattaatattagcaagcccatataccacaccttactatttgccaggctccgttttcagtactttacctgtcttaactcattccatccttataaaatccatgcattacttgtgtgagtctatcacccatgcattagacaaagctacattcaaattctggctgggccacttgctcgttgctgggcaggaggtttcactcaaactgagtttcctcatctgaaacgagaactataatgtgtacaggcatatcttgtctcattgtgttttacagatattgcatttttgtgacaaccctacagtgagcaattctcttggcatcatttttccaacagcatgtgctcacttcatgtttctaggtcacattttggtaatcttgcacaatttcaaactttttttatgattatatctgttatgctgatctgtgatcagtgatctttgaagttactattgtaattgttttgaggtgccatgaactgtgcccatataagacggcaaatttagtggataaatattgtgtgtattctgattgctccactgactggctattccccaatctctctccctctcctcaggcctccctattccctgagatacaatactattgaaattagtccaactaataatccttcaatggcctcaaagtattcaagtgaaagaaagagtcatacatctctcactttaaaatcaaaagctagaaatggttacacttagtgaggaaggcacgtcgaaagccaacacaggccaaaaactaggcctcttgtgccaaacagttagccaacttgtgagtgtaaaggaaaagttctggaaggaaattaaaagtgctactccaatgaacacatggatgataagaaagcaaaacagccttattcctgatagggagaaagttttagtagtctaacatagaagatcaaaccagccacaacattcccaagccaaagcctaatccagagcaagaccctaactctcattaattctgtgaagactgagagaggtgaggaagctgcagaagaaaagtttgaagttagctgagttcatgagtttaaggaaagaagccatctgcataacataaaagtgcaagtgaaacagcaagtgatgatgtagaagctacaccaagttaaccagaagatcaagctaaggtcattgatgaagatgactacactgaacaacagattttcaacatagatgaaatactcttcttttggaagaagatgccatcaagttgacctctggttagggcataatgcagctggtaactctaagttgaagttctgctcatttgccattctgaaaatctgaaggcccacaagaattatgctaaatctaagctgcttatgcgctataaatggagcaacaaagtctagatgacagtacatctgtttacagcatgttttactgaatattttaagcctattgttgagatatactgttcagtagactgtggaagggaattcttaaagaacttccacagtcaatggatggcttgaccaacattaattttcattccttactaggtatgttcattggacagataaggaaactgagactcagagggattaagacatttgtcccaggtcacacagctgaaatagagctgaaatcccaatgatacacactgctactcccatatccccacacaaatactgaactctttttcttgttggagtcatcagaagatcaagaagttattatatgtgttgagtgaaggaatataacacatgacctgaaatccagagacacacttcagctaaaggagaaatcttgtgttccacccccctcgtggaccccccgccctgcttaacttcttttaaagactgtcagagagacaggtcgagtcctttcatcaaggcatcccataccattgactgagcacttactatgccccacacactatgctaagtgcttcctcagcttttctcattttatttttacaaccacccttccagatgggtgtgattaccttcattacagaggaagagactaaaactcagagatgtgtcttctgactccaaagtctgtgttgctaaccctcaactagactgttcccaagcctgccatcatgctcaccttagggcaaagttagaaaaacctcaggttgatgggagctattggcaagagaccacatgagctgggtgggtctgaccactggcacccaaggcaaattagagaatgtgactcaaggtactcataattttattgtactactatttgtataaataataaataccatttttgaggggcaatgcctacaatttataaaattgttgtccaagcactgtgctaagaccattatacagacatttcctgatttttgatggttagacttagaatttttcaactttacaatggatttattgagagtattaagtgccttttaacttaggatattttcaacttacaatgggtttattgaggggtaacatcatcgtaagttaagaagtatctgtatagaaatccatataaaacttcatgctggccagtgtgtaaagaaagaaaaaaaatacatgcatacttaacaatgcagaaggataaataaaaaattgattaccttgcttgtctcctagaaggtgcactgggaggcttgggaggctggtgtagcagggaccacccatatgtagcttcctttggaccttagtgccacttccctggaatacatgagcagctttaaaaacaattctcaggcttccctacagttggtgtatctataggattaagatctggccaatgggaagtgagtagaagttgttatgtgggacatttaggaccgtgtctttaaaggagcatacccttttttctttcctctccctttttccttcctgactcatggcttgagctccagcagccatcgttgatcaggaagtgtaagggatgtattggtggcctccacagacccatgcctcctggtattcacacccttgtgtagtcccctcccacactgactctgggcttggccatgtaacttgctttggccaatgggacatcagcaaatgtgatgcaaacaaagacttaataaccacttgcacattagggcttgtcttctttaaacactccctcttggcagccaatgtcacaccataaagaagcatggactagactactaaatgatgaaagactccatagagaggggccctgaaagacaggaagctattttggatgtctcagccccagcagagctcccactaaatgcagccccctaagtgatctcagctgcaccatgtggagcagaagaaccacccaactgagcccagtcaatcatggaattatgagaaataacaaaataatgttgttgcaacttgtgaggtgatttaatacagaaaccaacatgaaccaaccttgaaaatgaaaggtacacactaaggatggaaaagcagaaagatgggagttgggatccttcatgaattcatggaaccacctctgtactttatttacaaggcagcagaaaacctaatatgttgagccttatgtgtctatgttttcagttatgtgtgactaaagttatgttggggacatgagcaagcggaagacttatttgcacatcatactctgctatgaatgttggaatgcactgcccagtgcccctttaggaacaaaaatctttatctgcttggaatgcttccagtagtcaatccttggctatgagcccatttgataattgcctcagcaaacagtgccactttagccaaggtcatgtttccttcccagagtggctgacatccagttagtgactgaagcgggaatacaagttcccagcctcctcaccccaatttgggacaactttgaggggccatcccccttcagagcactcatgcaattggtcaagtcctctgtgaaggttgcatttctgctcaacatctcccttcaccctatatttgtttccttcccttcccttccatgggggtggatcccaaaggcatgtcctaataaatttcctgcacactcgtctccaagtccttgaaaacccagcctacaacacagtgtttttcaaccctttgaatgttagagtatatgtctgtaatcctcattaaaaaaaaaagataaataagacagagttcatatgtagaaccaaatcacagtgtgggttctctaggaaacagggggttaggaatgcataagatttattgggaataacacctgtgaaaaggaaaaggaacagggagaagcaggattgggcagagggagccaccaggcagcattcaggcaagacaaagtctctgccagcacaatggagagcccagagcaaagctcacccattggaggagtcttgcaccaggtgggtagatacttgtaccggcatctgactcaaccagtctctgagctgagggcctccctgagaagagcattacttctacttgaaaactgaggcagtccccaaaagagctaataatggctgggcagcaagtcccagtttgaaggggaatctgagctgcacatgtctatgactcccactagctagaggggctttttcatagtcatccaatctgatacacctgtcccactaaacaggtcaacaaacagagggtcacagtgtctgttccaataccatccagagagtcagggtctgaattatggccagttcccagtccaggggtccttccaccagacttcaagccaactcatgtgaagagaaggaaagcgtggctttgagcttcccataggcagaggccatgcctgctcagacacagctgcctctctactgcctggcacatgagtgggaaataaatatgagatgggttgaattgaattgatgtgcaaatcccaacatttggtaaccctcaccagaaggctgggctatcagcattcctggggttcctggtgctgcaccgagcagtagtcattcatacccaagctctgctgagcccatggcaacaggagtatggattttggaatcatctattcatttattcattcagcaaacatttactgaattcaaacctgtgccaggcactgtgctgaacactggggatctgacatgaaatgaggcaggcagcatccctccttcatgcggcttcccatctagtggggtaggcagttcaaatgccagtccatatgtggttataaaacatagccacaaatcctgtgacaccctttccactgggaggcagggcctattccccctcctgatgaacctaggtgagcttctgactgctttgaccaacagcttaccgtggaagtgacccgatacggcttccagggcatgaataaggccacacagcttctgcctgatttctagaacacttgtccttggagacctggactactgccctgaggctgtcatgctggagaggccatgagtatctgctctggttgacagctgagcccagacttccagccagccctatcaaggcacaagacacatgaatgaagctgtcttaggccccccagatgagttcatctgaatggctgagtgaccctgagtgcattcctcgatgccacggagaacagaagaatcacccagctgagccccactctaattcttgccccacaaaatcatgatgtattattgcatgattattgtttaagtttgggggatagtttgtcaagcagcagatgtttaacactgaaactgtgcacctggtgggctcatatcacccctctgagcctccatggccttgtggaaaatgtagataataaaaacaactacatcataggtttatgataagtctcagagaatgaaaagccaggtgctgttctaagggctgttcccatttattcgtttagcacaggaccaggtacctatcaacccctaattacagggaagtatgatttctaattgggaaataacacgctatgtgaggtatgaataaatatattaactatggtcatcagcccagttatggaggcttgctgtgtgccaagcacagtgctaggcatttacatgaacgatcaggtcctgcctggtccttcaacccttcccccattcccttccattgctgggggctgtcctctttgcagccttctttctgctccttgagcatagcaagttctctgcttttacaaatgctcagtctgcctggatctccctgtgcaccctccccaagctcccgccaccatcaccatgactggttccttctactcactcagtcctcagctcaaatgtcacctcctcagagggtccccacccccgacctcctgatctaaggaaacgcagccttcctcaagttcacgtcactcaccctgtacaaaatccccaaatagcatgattcgtcgtctgaaagtgtttaccactaggttaaactccaggggaacaagggagtcccaattgccccctgccacactcccagtgcctggaacatggagaggagcaataaatattgaaggatgaaacacgctctacatcattgggtcttactgttaggaatatcagtcaaaatcatgactattgttcattcagcaaggattaattgagcacctattgtataccaggcatcattctgggtgctggggatacaacagtgatcaaatcagacaccagttttgctctcacagagttttcattttagtagctctgtgataagatacatgtgtgaaatacacagcatgtcacgtggaacttagtgctatgaagaaaaataaggtaggcagtgggagagagtatgaggggaatcttggcaccaaattccattcttccctccacagaagggactttcggttcccctcccctccacctccgcaccctgacccccataccccgtcaacatctctcagtgtgacattttgtttgaggtctctgcagctccaagaacaatattggctttgatgcaggtcccagcagagagccctcagactggaggggggattagttcccccttctttcccctggagggggaagtcaaacagtttggccttgtggggcctttcctcactatggggaagggggcaggcctgggccttcctggcctggatcgttgactaaccctgggttctgggccatcccctggcctcctccatcccaggcagagagtcaaggtttacaaacacggagaggcctttgatcggcagcagacccccagtgttctgttttttgttccaaacctcaggccaggactatactctgttttgcctccagcaggggagacagtgggtaggtggggagtgcgcgcgcgcgcgcgcgtgtgtgtgtgtgtgtgtgtgtgtgtgtgtgtttgtttggaggagtggaaggaatcagaggaaggctcacatggatccttgattttctttccaacaggcaggctaggtttggaagagagaattcaattcaattcaaaatacctaaggagcacctactaaatcccaggcaccatggtagaaattagggctagagcagtgaaccaaacagagctccctgcccagagccccaattctagagggggccacagacagcaaacaaatgagcaagtgaatacagaggctgtggggggccatgatgcgcttgacaggaatgaagctgggcagtcgatggggctgggatgagggtgctgtgggggcttcccagacaaagtggcatttggtagagacctgaaggaaatgagggaggcagccatgtggcgatcagtgggaaaagtgtttcagggaaagggaacagctgctatgaaggccctgagatgtgcgcaaggctggcatgttggaagaacagcaaggagcccagtgtggctgacccaggggaatagtggggagaggaacagcagaggggtcagaatggggagtgttggggttggtggggggaagtggagtggttttcctttttttcttttcttttcttttttgtttttaggagatggagtctcactctgtcacccaggctagagt[134 bp omitted]ttttttttcagtagagacaaggtttcaccgtgttgctcaggctggtctcgaacttctgagctcaggcaatctgcccacctcagcctcccaaagtgttaggattacaggcacgagcaaccatgcccggcccctttttttttctttctttctttttttttttttagtttgtttaattttgtttttaactaaaactaaactgtgtcatccaggctggagtgcagtggtgcaatcacagctcactgcagccttgaactcctgggcccaggagatccttcccgcctcagcctccccagtcgctgggactacaggcatgcaccaccttgcctggcagatctgaactgagatttaatagaattcctgggctgtgtggaaacagtggggacgacggcagaagtggggagaaccatgagaggcaactgcaggggttcaggcaaaagatcacatggcctacgccagggtggtcaggagggggaacggagagtagttccaaattcatcagcttcttttctttttttgagacagagtctcaccctgtccaggctggagtgcagtggcgatctcggctcactgcaacctccacatcctgggttcaagcgattctcctatctcagcctcccaagtagctgagattacaggcacccgccatcatgcccggctaatttttgtgtttttagtagagacagggtttcgccatgttggccagactggtcttaaactcctgacctcaggtgatctacccacctcggccttccaaagtgctggcattacagacacaagccaccacctggcctcacagctttttattgaagtaccacataaatactgaaaagtacccatataaacatgcctgcagtttcatgaaattttacaaacccaatccacccacataaccagcatcaagctcaagaaatagaacttgtccatcccccgagaagtccccagaagccccctccaaatcactgccccttcaccaagggcagccactctctcaactctttttttttttttttttttttttagtagagacaaggtttcaccgtgttgcccaggctggtctcgaactcctgagctcaggcaatccgcccacctcagcctcccaaattgttaggattacaggcacgagccactgcgcccggcccctttttttcttttcttttctttttctttagtttgtttaattttgtttttaactaaaactaaactgtgtcatccaggctggagtgcagtggtgcaatcacagctcactgcagccttgaactcctgggcccaggagatccttcccgcctcagcctccccagtcgctgggactacaggcatgcaccaccttgcctggcagatctgaactgagatttaatagaattcctgggctgcgtggaaacagtggggacgacggcagaagtggggagaaccatgagaggcaactgcaggggttcaggcaaaagatcacatggcctacgccagggtggccaggagggggaacggagagtagttccaaattcatcagcttcttttctttttttgagacagagtctcaccctgtccaggctggagtgcagtggcgatctcggctcactgcaacccccatctcctgggttcaagcgattctcctgtctcagcctcccaagtagctgggattacaggcgcccaccatcatgcctggctaatttttgtgtttttagtagagacagggtttcgccatgttggccagactggacttgaactcctgacctcaggtgatccgcccacctcggcattccaaagtgctggcattacaagcacaagccaccacctggcctcacagctttttattgaagtacaacataaatactgaaaagtacacatataaacatgcctgcagtttcatgaagttttacaaacccaatccacccacataaccagcatcaagctcaagaaatagaacttgtccatccccctagaagtccccagaagccccctccaaatcactgcccctcccccaagggcagccacgctcccaaccttttaattatattttgaaagtaaagctggcaggatcttttgctggatcgaatgggggcgaggggagctggtgaaagacaggagtcaaagagagcccccaggtttggggtgaagttctggattcctggggctgccatttactaagatgggaaacttgtgatgggggcagagactatgggtgaaaccaggggtttgttttgggacctgttgagttttgggatgcccgtgaggccctggggaagatacatgccatcttatctaaaggttgcaaattcaatgctctcagggacaagtaacaagaggagtaagacatatctcactctcctcttacctctgtaagaagaacaacgggaccagcgtgatgacaaacagtgactcagagccaaagagcaatagggagcagtggagactggggcaaattggaaagcacaggcccctctaaaagaagaggtgttagaacagggtcccgtgtggcaagatctcctgacgatgtttccagagaagccagatgtctagatttttacatatgaaacaatccatatgtatgtttgaaattgtttaacattggcatatgaaattgtttaacattggcaactaaaaagcaaacattatgtgaacccaagaaaactgcctacagttacagccacccactggacctagatcaaatcttccactttacaggtggagaaactgaggcccagggaagtctagaattttccccaaactcacagaaggagttggtggcagactttggccaggccttgaataggctgggtctcagtgccgggttctcacctcccaggccttggtaagaaggggctggagttagtctgtctccttcactttgatctaaatagagaggctctaacctgacagtaaaaggcagcaagatgctatgaacaagtatggctttggcggcctggggtctctatctgtgttggttaggaatgcttttggcttcaagtgatggaaaatctgatttatggtagcttcagctttggagacgtttacctgtgcatataataagtccagaaagtgaggtctgaggtcactaagaacagactcacactctgcccatccctctacctcaacatcttcctctcattgactctttaccatcaggggtggcctcatggcctccagattgctgctgaacctccggttattgccattgcattgaaaagcagacattgttgatggggatgtgctggtgtcagagcagggagagaattcttacatcttctcaccttctaggagaagcaaaatcttccacagaagcaatcttcccagatttgctcttgtatcttattggccagaaaagggtcacatgctgacacggtttggaggtttgtcccctccaaatctcaggttgaaatgtgacctccagtgtaggaggtggggctggtgggaggtactggatcatggcggcagatccctcgtgaatggcttggtgccctctctgtggtaatctctgagtgagccctggctctgttagttcacaagacagccagttgtttaaaggagcccggctcctccccttctctctcttgttcctgctttcaccatgggacactgcctgctccccctttgccttccaccatgatcggaagcttcctgaggccctcaccagaagcagatgctggagccatgcttgtacagcctgcagaactgtaagccaattaagcctcttttccctataaattacccagcctcaggtgtttctttacagcaatgcaaaaggcctaatacacatgcccattcctaatcaggaaccgatctgacctttcctgagatgaagctatcttcgcctaaaaatatctagactaattgggattctgtccaaaaggaataagaagggtaggccgggtgccatggctcatgcctataatcccagcactttgggaggccgaggcaggcagatcacttgaggtcaggagttcgagactagcctggccaacatgtcaaaatcctgtctctactaacaaatacaaaaattgagaccatcctggctaacacggtgaaaccccgtctctactaaaaaatacaaaaattcgccgggcgtggtggcgggcgcctgtagtcccagctacttgaaaggctgaggcaggagaatggcgtgaacccaggaggtgaagcttgcagtgagccaagatcaagccactgcactctagcctgggcgacagagcgagactccgtctcaaaaaaaaaaagggggtgggggatgggctcacgcctgtaatcccagcattttgggaggccaaggcaggtggatcatttgaggcgggactttgagaccagcttggccaatatggtgatatccccgtcttcactaaaaattcaaaaattagctgggcgtggtggtgggcacctgtgatcccagctactggggaggctgaggtgggagaattgcttgaacctgggaggtggaggttgtgatgagccgaaatcacactactacactccagcctgagtgacagagtgagactctgtctcaaaaaaaaaaaaaaagagggtgacttttggtaggcaataatgcctggcacaatttctaccatttacaggctgatgactctgggaaagttgcttagcacctctgagcctctactcccccatctgtaaaatgggtatggcagatggtattttgtttcttgccctctcagcatccatttcctatttttctgatgacatactttgattttccttcaggtaggagttttcagaacagcagcctcagcatcacctgggaagttgttagcaatgcagattctcaggccagtctcagacctttgattcagaagctttggaatggcagcctggcaaggtgggaaagtgcgtcttgtctacccttagcttataaggggaacaaatggagctgtattataatcacctgtttgctgttctctaaaaatagtagccacttaaatgacatcacgataatgatattgctcattgtcaccatgtgccatgcactgtggtagtgctccaactgctccacgtacctccttatatggatgcttgtggtggacatggatgtgcgacccagatcccttaaggaagcacctattgccccagaggcagggagagtggtcagcagtcagctcctgtggtcagctcctccagggatcaactcacagtaggcagagagtggccttgccagagctcgtgtcccttccaggcgtgacacccccaacgactgcataatgtgagactgcaaagtcctggccatctcaggccatcttgtgacatctctgaagagccatttcaactgcagagctcccgcagaattgactgaagctgctgctgggtctcagctccagttctccctctgcccgctcctgtgtactctgccctctcctgtgtcctctgccatctcctgtgtcctccatgctgtggatgttgatcccaagggcagctcaactgtatctgagtctgcttcctggggatcctgaccagtgacaatactcacagcaactccaccatgcagcaccactgtgagtccattttacagatgaggacactgaggctcagagaggtacaaggaggggatcctaggccatgcacctggtaaacaaggagacatgggctgggaagccagcacatttgtgaatagagaagtggcatgttctggctttaaaagggtcccctgggctgctgagtaaggaagaacggaaggggccaggacaagggcctcccaggccgcggctggaccttgtcatccctgcagcttcttcagaagagccagacgcagcccatgtgctcactaagtacccagtgaaggagtgagtgaagagagaatggatgaaaacattaagactggaaggaactagacatcctcacgtccgtctccctcattacatggtgcataattagcacagtgcctgctacacttaggtgctcagctaaggtggcgttgagtgaataaatgaacacgttcaaggaaaggagggagggagagaggggcatggacttgggaagaaaagatggaagtagaggaaggagaaggggagaaaagaaagggaggaagaaagaggggaaggagggaggagggaggaggaagagaagagagaaagtgaagggaggtttacctgttcgcaccaagaatgacagtaacttacgacccctggtggcagaaaagtgcacagtccattgaaattgcggtgcctagaattaaaggacgcaagggaagactcctagttccccaagaggttcaggctgcattcatttgttttctattgcttttaacagaatacttaaaactgggtaatttataaagaaaaggagtttatttcttactgttatggaggaatacaaggtcgagggggcacatctggtgggggcacagccttcttgaaggtggggactctacagagacctgaggcggcacatggcatcatgtgacaagggggctgggtgtgctagctcaggtctctcttcctcttataaagccaccagtcctgctctcataataacccattaatctattagtccacacgtggattaatcaattcatgagggcagaggccttaggatccaatcacctcttaaaggccccatctttcaatactgctaagttgggcattcagtttccaacacatgaaatacggggaacacattcaaaccacagcaggtgcagacccttgtaagaacatgggctcctccatcagggctctggcagtcagtgacagctgggttaggactagggtgaagcaagtgaggcacaaatttaaggaggcatccaaaaactcaataatccaaaaaatatcttaatgggatggttttaaaaatcaaattggcaaactatcgcccacgggccgactgtctgatttgtaaataaagttttattggaaccagggtcaggaatatggtggattcttgcagttaaatcagagattatgccctgcatgccttcgctaatgtagatgttcccaacccctaaggtagcacgtggtgtgggcgtggtcagctcagctcatccaacaataagaacacagcttgtttggagcactcactatgccagctttaaagcaactctactctggaactacctctcttggccccatggactggccacaaaagcacttttaaatgttccaggaatgtgggcctgtgtcaagtgttggtcgcatctcggtgtcatatcacatttccctggttctgccatttactaactgagtggcctggggcaggacttaatttctctgtgtctcatttgcttcttctgtaaaatgggttaatgcatggaaagaacgtaactctataaagtcagctgctgttgttaaaagcatgggtctgaatcccagctctgtcacttattgtgaccctaggacatatttcctattgcccagtgtttcctccaccataaaatggagattataatcctcatctggttgggtttagctggggattcacacaaaactgctagtgctgttggctcagcactgcaaagcacctgcagctccccggtggacgtcaagggatctgaaagtgcagagggttccttagccctttgtgagaggaactaggaaaggaatccactgttcacctaggaacatttgttaaccctttatttcccactgtgggccaagggctaagtgtgcagatggacgattctcctcctgggggcatttgtgacgtttctccagtctccaatatctgccactctccctcttgatacttgcaaagatcattactgcttcctgacagctgcggctacccccactgctactggccactgataccggagatagaaattatttaggcagatattcagggcaaaagagtcctcggcggaatttcccttctaacaaaaaagcagccccagaaatcatttcttttctaacaaagagcagcctgaaaaatccagctgcaaacatagataaggaagctggaagcttgcacgggggaatgctggtagctgtgccaatagagaagggctaactgggggccaggcatgtctaacacgaggctccatcttcccttttcttttaccacgtgtacagtaataaagaaatgggcaacatggcacagctcaggcagagaactcgcctgcataataaaagactggggtgggggtgccgagattcataccctgtgccaatggcacacctgggtccaaccagtttttcacaccctatgtagatcagacagcacctcctcaccagctcatctataaaactcccttgcatttcactgcagatccagcaacccatttttccaggacccctcttgtagcagagcgctattctctttctttcaactattaaatttctgctcttcacctcactctttgtgggtccctgtccttgatctccgtgaccatgagacaacgagcctcgggtgttacccccagacaagcctgcttctccaccgcgttccctgcctcagtggctgccaggtcctgtgccaagcagttggagcatgctcgccacagcttccaccctggctactgtttttactggaccagctggtttcggtcgccttttcacttccaggtttcttgcttccactcttgccctctatggttttctgccagcaaccaatgcaaccctttcaaaacaatcaggtatcaccctgttaaaaaccctgagtcccattaagaacaaaacccaaccttgtaacagggccctgcaggatccggccccgcctctcccatctcatgttctgctcctcccccttgctcactaatgccggccacaccagccttgctgtcggggatgtttcttcttcgccaacttcgcacgccacagcctgcctgggatatactctcttcatctcctgtgtttctggttttccttcacatcttcactcatcactgtctgaaactgtcttatgttccccaggaaagtaagcttcatgttcccctctattagatctccagtgcccggcgcatagtgagtactagtgtattagtccgttctcacactgctgataaagacatacccgagaccgggtaatttataaaggaaaagtttaataactcacagttcagcatggctggggatgcctcagaaaacttataatcatggcagatggggaaacaaacacacccttctccacgtggcagcaggaagtgccgaacaagagggaaaagccccttataaaaccatcagatctcgtgagaactcactcgctatcacgagaacagcacggaggtagccgccccgaggattaaattacctcccactgggtccctcccatgtcacgtggggattacgggaacaattcaagatgagatttggatggggacacagccaaaccctatcaactagggatttgttgacttaatgcacacgagccaaccataccccaacaaagcaggtactagccttatagtacacgtgaggaaactgaggaatgaggcatctcattcatgttgggaatattaattgaaaaacctgtcagctcctgtggcccttggagttccttgaaaataatgttatacgccaatacttattatagtactgtaaagatgcaccatatcccatatctcatttgtcagtggaaagaacacagatttggagccaggtaaaagtacctcttgctacctgtgacgtcttggacaagttcccaccttttggggccagtttctccatctataaaatggggataatgcctaacttaagagttattttagatccaatataaaaattcccagcccaatgcctggcatgcagtaagcaggcaattatattatttttcctctctactagtcacaactacccaggaagggaagttttcactcattcctggccatccgccccatgctgggcacttggggcatgctgactgtggtgaatgaaacagacagggtactggtcctactattatagaatgtttgcttcataagaacaggcactgactgtatcatctctgaacacaatggaatgaagctggcaataacaaaagaaaaattggaacatttacaaatgtgtggaaattaacagatttctaaacaatcaaggggtcaaagaagaaatcacaagggaaattagaaaatactttgagatgaatgaaaacaaaaacacaaaataccaaaactgagagtgtgtgatgacaacagtgtgcagagggaaattcatagctgcaaatgtccatattaagaaacaagacagtaactatgtgaggtgatgggtgttaattagctcagctgtagcaatcatttcataatgtatatcaaaacatcccactgtatactttatacttttttataaaaataaatattcttacaaaaggacaggcgctgtgtctgtctggctcaccattgtacccaatacccaacagggtgccaagtacccaatacccaacagggtgccaaggaacacaaaaggcactcaaaatatgtttgttgattggagtttacaaggaagaaaggtattttcttatccctctcttcccttcccacccaaacatagcttcttctaagaaaagaaactgaggctgggcaaggttaaaagctagctcctggtacttttgcatccacactcagtttacctgtgccttaaaccagacttcatcaaacttcagtcttcacaagtcacttcaccatttttgctctacctacttactgcctgtgatagaaatcaactcagtttgtttagcggtataaacttaaaaggaactttagatcaatcacttgtcttagaaggtaaccacaaaaatacaaagcaataaaaataaaaacatgttaacatgaatttcagttgcctgaaagctgtaagtctgcttttttaaaagagaaattggagttaagcagacttttcattttttgatcatgaccctgaaagagaaatatatttgacatcaaaactcagcacatatccttggtctatatatacacgtgaaagtttcataaaacaatacactgatattttccatgctgtattctatttcattttttaaaatgctggttgtatcccattaaactggtttcaaaataaatataacatgtacacaacaacaacaaaaaaaaacactgggttagagggccagtaagctcagcgagtatcagcaactgagacttcatccttgtctcacaaggactaaaaagagaataatgttctcattatgtggttcaatgccacacccatgtatctgagatatacatgtcacaatctgggagaagcctgtcctcaatttactttaaatacccaattctgcctagaacatgacttagacacatagtaagctcttgagtgaagtgcagatgataatgacacgatcacataccacttaaaaatatcttaacacctttacttagatctcatctcatacttgtagcatttcttcaaatttactttgaaaaaagagcttcactgtgtgtggttgtcatacacattcttctacccaaccatggacctctttcttcctctcaggcgcacttcatctaatttttttagcactggcctggcctttttggaggaggtggagtagctcttcagaaaggcttcaaacacagtttcagtgttgggatgggtactgaggaaggccttctccaggacatagaggtctactcccttatcctctggaagtgctgaaatgaaactcagcccaaagtctatgagcacaatgttcagctgttccagggggggtttcaggagcatgttggaggtggtgagatcaccatgaatgaggtcttcatcgtgcattcgagccaaaacctgcccaattgtcttggctaagttggagagaccctggggagttttttcagtctccatagtggactgaatataatctcgaacagtcactgagccttcaatttcttccatatataagcagttggaagcatagtccacaaaaaagacaactggggcagatattcctgaaatcaagacataagtggttattgggttggattttttttaacgggtaaacttaattttcaaagattaagccagtttttccatctatatctacttatttcaggactattgaggaatgctacaggaaatggtacaactgaactcatctggaatattcccctgctcatgcccactgcaggactatgcctgggaacaccccacagctaaactgaggaggccatagcttcctcctcccttccaaaccaccctttctcactggacttcatttgtcacactcactctctaaaaaacaaacaaaacaaaggccgggtgtggtggctcatgcctgtaatcccagcactttgggaggcggaggcaggcggatcacttgaggtcagaagttcgagacccccatctctactaaaaatacaaaaattagccaggtgtggtggctcacgcctgtagtcccagctactcgggaggctgaggcaggagaatagcttgaactcagggagcgtaagttgcagtgagctgagattgtgccactgcaccactccagcctgggtgacaaagtgagacactgtctcaaaaaacaaaaacaaagagcaaggcacagcccagtcagagcagtttctactgatgaggacacaaacaggaggccaagcagtgtgctagcttcgaggttcatcttcgtagtcagagaggacagggttcaaatcccagctgcttttcttattagttgtctaatctaatcttaaaattacattaacttctctaagcctcagtttctgctactatacaaggaacaatagctccaataaactcaatgaatctttactgaaagtcaaccaggctcagtatacttttctagaaactgagagatgttatcaatggggatacagcaataaacaagccagctataatacaatctctgcttaacgaaacagatcatgaggctgaaaacagaaatatgaatacacaaataacttcatgaaatcttaagtctctgaaagggcagcaatgtgtccgcttgttggctactgaatatcccccacccagatctcccagcacttaacaatgtcctggtacccactggtacctaaaaaatactgataaaagaaaggcaagaagcgtaaaagtaaaaagccagggcttctgagtcagaggcataaggagctgagggcctggaccggccacttagtaaccgtgtaaccttgggcaagttacttctctctgagtgtcactttctcatctgaggacaaagtttatggtgctggcgcacaatgatgtttaatgaaaaaataggcaatttaatgaaatccaacatttattgggcactatgtgccaggcacacatttgaacataatacgtgacacacatacctcctctaatggtcacaacatccctatgacatggatactgctactatgtctcccattttacaggtgagaaaaccgaggctgagaggctaaataacttgttgaaaggctacacaagcagcagagttagtatttcaacccagggagcctggctccagtggggcaagtacttgtcattacatgtttcttaaaactaataaatggaaagataatgatcgaaaattgaaacgagtcaaatggggaaaccaaggctcagggaagttaaacatgttcaacattgagcaataatgacagatcccagatttgaaccaggcagaacggcctcaggacaaaagcttgacgctgcatggccacgtggtttcttaagacttaacgaatgaaaaaagggatgaaagaataacatttccgaaaggccggacaccgcagaaggcacagaaggagaaactgagggaaatccagcttcggagcgcaggggagtccctcacccgcccaggccccagagcctcggggccgcccacgccgggatcccggcccaccttaccagcgcggcgacagcggaggagcgcccgggcctcctgcaccgtccgccgtctgccaagccgcgcctccagcgccgggtgccggtagcccttggggaagcggtgcttgatcaccgccgcgcggccctggaagcggccacggaacacgcgcgcctcggcaccctgcttcaccagctccaggccgctcaagaagcggctgctccgctcccgggctgcggccagagcctcagcctccggggcgggctcctcgccatcggccggcgtagtagctctggccgccgccatgactgctcggcgcaacagctccaaccgatcagctgtctctgaaaactgtcgcgatgcttcggctcgcttcggaaatcctgggacttcttcggcaatcctgggacttcttcggctacccgaatgcgtccaccccggacacttccggcctgtaagtggttacgcctcccaacttttcggctctctgaagcctgaggttccctgcaggaagggctcttgtggccccgccttccgcctcttcggctatctccgtacacgttcggcaacgctcagtaagtggctcttcccgactccttggctctccggaaatcttcggtgactctcgcagccggctttgggggcccacctctcagttggtcgtctctttccggaaaacttcggcgcctctcgagaaaaacgtcggacgcgctttgctctcttcagaagtctcttccgggacagctgtaccctctagtagtctctttttggaactcctcttcccctgactcctacattccccccaaaatgtgctcatacaagtcagagtcggaagggtcagacaatgaaccatgtttccgacatcctcttaagtgctaggataactaccatttagtgcattcagaagaaataaggttaaatgatgaaaatccttacagaaaagaaaattgagactcagagctggcagagggggtggtaagatggggtggggagtgggggctggggaatccgggaaagtcttccggagacagaacctaaactgaattgggaataattaaactttttcagtttctacctgtttcattacaaagcttataataacacaggctgtagcaaattcttacaatacggaactttgcacacgcacacataaataaataaactacctatcccccttgtgacactgctggccgttagtttctttccagaattttctttcattcagtgtgcacactcacacatcgttgtggcgttttttccaacataaatgacatcatactgtgggttctttggcaacttgcttttcattttcctaaacaatttatctcagactatattccatatcaatacatacagagctaccacgtccttctacctggtcaggcagtttcttgttgctaaacagttgtttccagtttgttgtttctcaggaaaacactttacttactattgccagtttattataaaagatagtataaaagataaaaatgaacagccagatgaagacgtacataaggaaaagtaaaaattgtacgtgtttatcgtaagtaacatgttttgaaatatgtatacattgtggaatggctaaatccagctagttaacgttacctaacatactgatcatttcgggggtgaggacacttaaaatctattatcttagcatttttcaagaatacaacccattgttattatctatagtcaccatgtcgtgcaatagatttcatgaatgtttcctcctatctaactgaaattttgtatcctttgaccaacttctcaaaatcctccctatctccctccccctaccccaccgcctggtaaccaccattctactctgcttgcatgagttcaacttttcttaccttcctcatataagtgagatcatgggatatttgtctttctgtgcctagcttatttcatttaacacaatatcctcctgttccatccatgttgctgtaaatgacagcattccattctttttaaaggctgaatagtatcccattgtgtatataaatgtaccatatttttatccattcatttagtgatggacactcagattgagaattgtgaatgatgctgcaattaacatgggactgcagacatctcttcaatatactgattttgtttcctttggatatgtacccagtagtagggttgctggatcataaggtagttctatttttattttttttgaagaacctccatactgttgtccataatgtctgtactaatttacattcctatcaacagggtgcaacggttcccttttctccacatccttgccaacacttattatctttcttatgttttaaaatagcgattctaacaggtcagaggtgatatctcattgtgggtttaatttgcatttcgctgatgattagtgatgttgagcatttttttttaatatacccgttgtccatttttatgtcttcttttgagaaagatttctttggatcttttgcctacttttaattcaggttttgtcctttcttactattggattgtattccttatatatttggatattaacccctcatcagatgtatggtttgcaaaaattttctcccattctgtagtttgtcttttcactctttttttttcttttttcttgactgtgcagaaacgttttagtttgatgcaattccatttgtctattttcacttttgctgcctgtgttttgagagtcctacacaaaaaatcgttgctcaggccaatgccatgacattttgtccctgttttcttataagagttttatagttttggctcttacatttaagtctaatccattttgagttgatttttgcatatgatgtaagataagagtctaaattctttcacatgaatatccagttgtcccaacaccatttatagaaaagactgtcctttctccattacgcgttcttggcatgtttgatgaaactcaattgactatagtgcgtggatttatttctgggctctctattctgttccattggtctatgtgcctgtttttatgccagtgacatgctgttttgattacaataactttgtagtatattttgaagtcaggcaatatgatgcctccagctttgttctttttgctcaagattgctttgactatatggagtctattatgattctatataaattttagaattttttatttctacaaaaatgtcattggaatattgataagaattacatggaatctgtaggacattttaacaatgttacttctccagttttgtttcatttttttttgttttgttgtctcttataaacagtgctgcagtgagcaggcttatccagccatctttgcacacatgaatgtttctgaggacatctttctacaggtgatattgctgggttgtaggtgacaagcactttgaaactcgactcctcagccaaactaccctcccaaagttttgtgcctatttatgcttcagtcaaattcatgtctcattttcccatatcttcatcttcattgagattctcaggtgctggaacgctcagtcagggggtggagagggagggtgctcaggttccaggcagtgagaacagacacagggtaggattgggttggacaaggaccagcagctccacatggctgctggcaggttggcactggggacaggctgggagctgaaagaacaaggacagtggcctggtcccaaaggatttctcttgctggaggagaggtgctgtgagcctggggtgactacaccaagcatggccctttggggccttgacctctggctgcaaaatatgcagctgagctctgggtagaacagccaagcagtaaaggggagggaggggtctactttttagccctttctgagcctgaaagagaacctatggcctcttcttcacttcccacccaccagcaccagatgcccattcagtgatttattcaccaattaatttaataaatatttattgagtgactactataggccaggtactgtgctaggccctggggacagagctgtaaacaaaatagagaataattattactgccctcatggagtttacattctagtgggtggaaaccagcaataaacaaataaggaaaatgtgtcattgacaggggctagcaggagataaatccagcaggaagggggatgggaaggatgacgtgcatctgggcttgccagggacagccccagtttttgcctgttgccctggcataactattattagtgcccccgccttttttttgagaaggagtctcactctgttgcccaggctggagtgcagtggcatgatcttggctcactgcaacctcaacctcccaggttcaagtgattctcaggcctcagcctcctgagtagctgggactataggtgtatgccaccatgcccaactaatttttttgtatttttagtagagatggggtttcaccgtgttggataggctggtctcaaactcctgacctcaagtgatccacctgcctcggcctcccaaagtgctgggattacaggcgtgagccactgcgcccaggctagtgtcccctttttactctcaaaagcattctagtttggatgatacaatatatggttaccctatgtgtagtagagtgggggtgggagggagtgatgcaattttattttattttattttttatttttatttttattgagacagggtcttgctttgttgcccaggctgcagtgcagtgatgcaacctgctggggctcaagcaatcaatcctcctaccttagccttctgagtagctgggaccacaagcatgtgccaccacccccagccaattgttaccattttttgtagagatggggtctccctatgtagtgcaggctggttacgaactcctggcctcaagtgatcctgttgcctcggcctccctcccaaacttctgggattacacatctgagctaccatgccgggcctaattttaaataaagtggttgagaaggtgtcaacgaaaaggtgacatttgaaccctgtgaatggattcctgggggaagatctttccagacaggagaggccccagagaggaagtgtgcttgacatgtttgagtaagagtgagttatttaacctctctgtgctttagtttcctcatctgtaaaagaagattgtagataatattcatcttgtagggtttttgtgatgattaaatgtgtaacaaggtaaaacacatagaaccgtgctgggcacatgatatgcacttcgaaatggaagctattattattatggagtgtttagtatgatgacaattaaaactggacccccagtatccaaccactgctccttgtgggggaaggggcttcccattgtgtggtgtctcggggaacacagaaaccacctcccactacagaagcctctcctttgccccatccttgtgtggcttgcaacaagaaccctgacttgtaccaccactgagtggaggtgtgttgtaactgtattaattagctaggaaacaaaataaactgctataacaaagtaacctacaaatactggcttaaatatgagagagatttatttcttgcttatgaaacatccagatctgttattctcaacttattgcttcctcctctgagtctactccacttgttgccctctccactcagcaaaaagggtgatgacaaccaggaaaaagagatcaaccagctaagaacttggcccaaagttgcacatgtcacttccactctcatcctattggccagaacttagtcacatggaagatgcaaaggaagctgggaaatgtattctttagcagggcggacacgaattcagctaaaaccctgggtgattattactaaaaggaaggaggggaggaatgatattgggggacaattaatagactgcaatggttttgatattttaaactgcaagtaacatcagtcaactaattagcttaattggcataaacaataagttcatttattatctcccaaaatttcaagaggtgtggctgggtgcagtggctcacgcctgtaatcccagcactttgggaggctgaggcaagtggatcacctgaggtaaggagttggagaccagcctggccaacatagctaaaccctgtctctactaaaaatgcaaaaaatttgctgagcatagtggcatgcgcctgtagtcccagctactcaggaggctgaggcaggagaatcacttgaacccaggaggcagaggttgcagtgagccacgatcacaccattgcactccagcctgcacaacaagagcaaaactccatctcaataaataaataaataatttcaagagatggaaggtcccagctgtcattagataccaaggacatggggtcctttcattcttttccaccagcctcagcatgttgttttggtccttatccttgtcaccttatgatctcaagatggctatcaaagttccacacattatctgaagacacaaaaacatttggttcaagaagaggggcagtacctcctgtatagttttctttatttgggagaaaatcctttgctgaagcctcttctctccccatcacacttcccataaagggcatcggtcatagttggcccatgtgcctttggcttagctacagaggaagctggaaaagtgaggatctggcatcttcagcctttgaagatggagatgtgttctataagcaacgagcaagcgagctgggcatagctattggaaaggcagccacaaatggctggcacactgtgacgcccaccaacatcatttttctgtatttcagtttaatcatcttcagaatggggataattagttctactttggcaagtgcttataaaaattaaacaagatgttcaacataagggtgcctggtggatagcagacactcttcatttgttcattttccttccttccacccactagtcactggggccctgtttgaaataccaaagaaaagccctttggtctgagggttgctatgacaccaatgccttgggctctgcagtccttaggtttcattcacacacgaggcaggtcgctttttcaaacataagatcctttatgttggcataatgtggtttctagcacctttcatcagcccagactactcaaagcctacccagaaccaattctatttataactcccagtttcccaagtttgtggcttcattatcataattgttagtgtccacgtagttgtctctatggttaccaaattcatctgagcctctgccttagaaatctgcatgaaaacatatttacaagacccaggcttgctatggtcagactggttctggcttctgtggcaggaaactcaatttaaagcctttcagtggctccccactgcacttaggataaagatccaatccttaattcagcccaggaggccctgcataagatccctgcatccacttccaaacttatctcccgtgaaactcccccttctacttggtctctgctttttttctttctttcttttttaagaaacagggtctcactctgtcacccaggctggagtgcagtggcatgatctcagctcactgcagcctccaacctcctggtctcaagcgattctctggcctcagcctcctgagtagctaagacttcaggcatgagccaccacacctagctaatttttgtatttttttataaagatgggtgtcttactatgttgcccaggctggtctccaattcccagacaactgtaatatcaagaaacaccaggagaggagtgaggtaaggacaggaaggcagtcagtgaaaggtgagcccatttccactctgggcaactagagctgaatcccactggggaacagaagccagtgtagatgactcaggcctcagacccaaggggcaagggacctgggtacttagacagcagtcgttgactgagggttgttcccaagagatgttactttctctgtgctcctggcctgccacaaagcagcagagcaggggcagagagagcccaaatgcagatgccggcttgactgtcagccatgtgcagtgaagggcaaggcatccaggggactgagcatagcactgccagtgactgcccaatggggatacattttgcattattcatcgccatggtggctgcaaatgacagaaacaagcttaaccacaaaaagaaatttattttaggtgcagctggacccaggggctcacaggatgtatctggctgcctctcaacattgctttcatcttcaatggctttatctccaggagtgctccctttctcatgatgagctccacatcaaccagcccagcaaccccagcagaaagaacagacccttctgcactggtttctcattgctgctgcaacgaattgccacacacttagtagcttaagtgacatttttttttttttgagacagggtctcactctgtcatccaggctggagtgcagtggcatgatcagggctcactgcagcttcaactcccccctacaagcccaagcaatccttctgctgaaacctcccgagtagctgggactataggactacatgtgtgagccaccacgccctgctgatttgttgtatttttagtagagattgggtttcgccctgttggccaggtctcaaactcctggactcaagcaatctgcccaccttgtcctcccaaagtgttgggattacaggcatgagccaccatgcccagccttaaatgacatttattatcttacagttctagagatcagaagtctgaaatgggtctcactggggtgaaattggagtgtcagcagggctgtgttcctttctgggggctttagggatagaatctgtttacctgcttttctaatgtctaaaagctgcccacattccttgtctgatagccccctttctctgtcttcaaggccagcaacatccggtcaattccttctgtgtaaggacactctgtgttgctataaagaatacctgaggctgggtggtttatagagaaaagaggtttattttggctcatggttctgcaggctgtagaggaagcacaacaccacatctgcttctggtgaggcctcaggaagcttgcaatcatggcagaaggtgaaaggggagcagacgtgccacatggtgagagagggagcaagagagaagggaggaggtgccagtgggctctttgaacaaccagatctcacatggactaatagagcaagaactcactcatgaacatgcagaaggcaccaagccattcatgagagatctgcccccatgacccaaatacttcccattaggcccctcctgcaacattaggggtcatatttcaacatgagatttggagggaacacacatccaaaccatatcgccttctcaggctgccatctccccagctctctctcctgcctccttctacttttaaggatccttgtgattacattaggcccacccggctaatccaggataatctttccaaaatctgctggctagcaactttatttttttgagatgaagtcttaacttactctgccacccaggctggagtgcagtggcctgatctctgttcactgcaaactccgcctcccagattcaagcaattctcctgccccagcctcccgagtagctgagatgacagacgtgtgccaccatgcctagctaatttttgtatttttagtacagacggggtttcgccatgttggccagggtggtcttgaactcctgacctcaagtgatctacccacctcggcatcccagagtgctgggattataggcgtgagccaccaccgcacccggcctcacaactttaattctatctgcaacctgaattcccctttgccatgtggcctaatatattcacagtctccagagatgagaataggaacgtctttgtggattgttattttgcctgctacactattttcccccaacagttctagcaaaaatccaggatcaattttcattggtctgccttgggtcacataactgtttctgaacacactactgtagacaaagcaatggaaaagactgattggccagatctggtcatgtggaaaggggaggtggagccagccccattggaattcacatggagagtgaagaaggtgtggctccccaaaggaaaatctgagtggtcttaccaggagaaggtataatgaatgtcaggcaggcaaaagtccgggatgctcactacaggtcagcaggccagaatttcttgttgtgggaagaagatgatacatgtttagaattgtaatgttgtaatgttgaattttaaattaaaagaaaatttcggcactgttctgggtgataacaagcctccatcactgcaaacctccaataaatataaccacatacattgcctagtgcacgactccaaagttgtaagaaaaatcggacaactattacaggcatgaagacgagcagtgatagggaattaggcaagagtacagggaaaaaaagcaagaagtgattaggagaaatttcagcctcctccatccaccctactcctagaatccagctccagaacattagatttccctttatatgagtgtagtgggataatatatttttaatgatgatttttaaaaactacatctttatcccattactgttgaaacatactagaaatgatttggttcatttgtgaataacagaaagactcacaatagcagtgactcaaacaatctagcagtttatctttgaagtacagagacagtggggccaggcctgaagtggtacatcacggagttaggaacccagattgctgctgtggggttgctctgctgggttcagtttctactctcaaggtctcatggcacaaaatggctgctggagctctgtcaatcatgactgcattctggctggctttaaagacacttccaataaatttcatgcagtacctatgcttatatccgtaaccatcatgctacacgcatacatttaacccagtggttctcaaacggaagagattttgcctcccagggaatatttggcaatgcgaggagcagggagtgtgctgccctctagtgcgaagaagccagcgatgctgctaaacatcctacagtacagagcatcttcctacaacagtctttcagtccaaaatgtcaatagtgctgaggttgagaaacctggtttatcctttccgagcctcagtttcctcacttatctaaatgctgggaacagagaaatgatcaaaacagagaaaatgataaaacacgggacacaggggaggcttcctcagattaattatacaggactcatgagttcttacggaattcaaatttgatcaatcacgtgaaggttttacaaactaaggcactactaggggacaaatctgtgattgtttcaagtcagctgagtagcgttcagtgacagtggagcaggcagagcagggataaaggactatttgcaatggttcaagcctagtatttgggaaccagaagggaagggatagtgcagtaccccagagagggtaaccgtggagctgtcaccatccttgagccacaggggtgaaggaaggagtaaaaggagaaagtcatatagagaaaaggttgtttggagaggagcaaggagcaatgcactaggagacagaaggcctgggtcacatagtcttgcagaagtccccaaaagccctgcgtatcgctcgtcacctctgccctcgtctcctatctctcttcccctcattctgctccagccatcctggcctccctgctcttcctcagacacactcctgcctcagggctctggcgcgtgctgtttcctctgcttggaatgctgatcccacaggtatccttctgcccattctctcacctcattcaggtcttttcccaagtgtcaccttctcattgaggacttcccaaaccacctgattaggaattggcacactgccattcctcttgcaactttgatcctctttccctgctttatttttctccatactgtttatcattatctggtaccttatacaatttacgtatttatcttgtattgtattgtattttacatattgtaaaatatgtaaaaaatgtaaaatctgtcgtctgtctccctttattgaatgtaagctccatggagacaagagtttttctctgttttgatcatttctcggttcccagcacttagataagttatcagcataataaatactcaatatatacctgttgaattaataattaaatgtaagaatgaatgaatttattcattcataaaattaattgttcatgaatctcattaattattcatgaagtaattgaatcagtaaaccactcctcttccatgtgaatcagaactgactcattagcatactccaccggctcccagcctggccaatgagactcaattctgagactttggagagagctctttgaaaagacaagctctctttataccaaggaaaataaactgtgaggatgtgagtctgggactacccagtaaacctgcctgagagggaacccaaaatagaagaagcagagaattacagagatctgatgaaatcatttaaccctggatccggccatgcctgaagcagaattttaaaatatatgttaaccaacaaatatatttttttcttaagctgctttgagttaggtctctgtaacttgcaactgaaagcatcctgactgccaggatgagagatgtggagcagagatgatttgcagaccaacgagagaatcagccaaatagcagacatgggagagaagagcacagatcctgggaaataaatacatatttttctatgcccctgaggttttgtgggaatcttttgttgttgttctgtttatttgttgtgtagcaattttgtggcaacagttaaccatgacgaataccgtggggcaaatggaatctgtttggcccaacatcagccttcccaatgactgagtcaggtttagaggtgctctgctactctgggcaggatgtaggacatgggacacaggggaagctttgttgaggttgtctgtgtcctagccagttaacttgatatggattctggtgtcctttgggttgtgtccggtttgctaacaccttgtttttaaaacataatatctcctgcttcattaaaaaaaaaatcaggaaagttcacgtttcctataatgaaaaatattagcatcaggtccacattcctacctagccagcctgctgagctccacccagctgtccctgttagtcctttttttttttggcaagggtgggggtggggggtggggggtgggggcagggtttcgctctatcacctaggctggagtgcagtggtgcaatctcagtacactgcaacctccacttcctggctcaagtgatccttcagcctcagccccctgagtagctgggatcccaggcacaagccaccatgcccggctcatttttgtattttttatagagacagggttttgccatgttgctcaggctggtctccaacccctgagctcaaagcgatccacccacctcggcctcccaaagtgctaggattacaggcatgagccaccccatctggcgccctgagagtctcgacctgtggttgtcaaactttttctgaaaggccagatagtaaatatttaaagcactgtgggccataccatcatgtctgttacaactactcaactttgctgttgtagtgcaaaggcaaccatggacaatatggaaatgcacaggcatgactgtgttcgaataaaactttatagacaaaacagtcagctgattgtagtctgctgacttccgccctgaatgaacagccttcagcttgccacagtcctcaccactccgcactgccttatgcccggctcacttccctcacttataacacctcagtgggccctgtaggcgtatgaatttgcagcctctaatctaagttctttttaaggttagagtttggggaacaaaaaacaggcagtcttgtaagctggctgcttgggtgaacaagaggaaggtaaaatccttcaacaattatgatttagcaactagtatgtgctaggtgtaattctagatgtttatcctgaaccaaaacactgggatacagaagagaaaaagggagatttaaaaaaattcctgaccaggtgcgatgactcatgcctgtaatcccagcattttgggaggccgaggcaaattccttgagcccaggaatttgagaccagacagggcaatgtggcaaagccccatttctacagaaaatataaaaaaattagcccaatgtggtggcacacgcttatagtcccagctacttgggaggctgaggtgagaggatcacttgggcttggggtggtcaaggctgcagtgagctgtgattgctctactgtactccagcctcggcaacagagcgagatcttgtctccaaaaaaaaaaaaatcccactcatagagcttcattttaagggagaagacagagtaaacaaataaatgagagatataatgtgttaaggataatagatatgttccttatcttaattgtgatgatggtttcacgtgatggtttcacaggtgtaaatgtgtgaaaatttgtcaaactatacactttaagtatgagcagcttatcatatgccaactgtgcttctgttaaattaagtttagcctgaagctgcctccttacctatttctagttcagcctaaaggtttccctgtacgtgatgaaccatgacctaactagatgtgtaaacagactacaacttacccttgcaccagtcaccaagttttggccaatcagtggtggccaactgttcaaactgtgttcaaataagacaaatgccaagctgtaaccaatccaattgtttctgtacctcacttccgttttctctatgtcactttcctttttgtgtccataaatcctctccaaccatgtggtaacacctattctggttcggggggctgcccaattcacaaattatcctctgctccattaaactctgttaaatttaattggtccaaagtttttcttttaatagttcaataaagcttatatatatatatatatatatatatatatacacacacacacacacacatatataaagaaatgaagaaaaaaacaactgcttatctagaaagataccaaaatgtaactaggtttttgagttttgttccaaatatgtattatttttaacatatgatgttctttaatgtgtcatatattgctattttaataaagagctccatttttgtttctgtctttaaaaaaagatatacagtgtatcagatggtgataagtacaacagatagaaatatgcaaagaagagatatagagagagttggaagggggttataaatggtaaatgagaagacagagaaaaacagtaattaagatctcacagtggccgggtgtggtggctcacacctgtaattccagcactttgggaggctgaggcgggcagatcacttgaggccaggaatccgagaccagactgcaacattgtgaaacccagtctctactaaaaatacaaaaattagccaggcgcggtggcaggcctctgtaatcccagctacttgggaggttgaggcacgagaatctcttgaacctgggaggcggaggctgcagtgagccaagatcgtgccactgcactgcagcctaggtgacagagtgagactttgtctcaaaaaaaaaaaaaaagaaaagaaaaagaaaaaagatctcaaagtaagctgggtgtggttgtgactataacaggtctgttgcttgaagcagggcaagtcaatacaccaatacagagggttgcggcagagaaagagttaaaaaaaatcttagggcagctgaatgaggagacagaaggaaacctcaaatccacctcctggaggagtttcagccttgggattttaagggttttggagtgggctgaggtatagggatcgtcgtttggttgaagaatgcagagtgaagtcacaggacagggagataaagaaatttcgttcttaggctgattcagttcctctgtgggggtcttcaaactggttggtgtctgccggtccactggaattcaggatctgaagaacatcttaagcaattcctaaacaaaaagccttatgatgcaaaggtcagaaatcctatctgtaggaacaatggggatgcaaatggcagtatctagtgccacatgactttcagttacaaggaagtgggccaaagggcagccaaattaatgcttaattataactatgtttctgcccagaacccagcatgtaattctagttaaccctatgaggacaatttcatggcggcacatgcctatagtctttgctactcagaagactgaggcaggaggatcacttgagtcaggagttagaggctgaagggcactatcctcatgcctgtgaatagccactgcactccagcctgggcaacatagtgagactccatcgcaaaaaatacaaaataaaatctcaaagcagaatccacttacaaaacaaactctaaatgtgcaagttatactccctttctcagccctaatccaaccctccatcgtgccctcccctcctcactcctgctaaacttcagggttgccgacagctgagtttaagctccatgccctgctacatgattcacagctgaagcctccttctgggtcttgctgtcttcatcctgcctcttctgatccatcccgacagtcccagggaagtgtagttgttcctggtctgttcctcattagctgtgtcgaaagacaaaatcacaagtttaaagatctcagttggctttatttacaattctaaaattgggcaacacttcgtttcatcaaatagaataaatgttccagtaagctgagaagcagaggttggctttataaagacagagaaggactgaagaaagcagaaacaaagaacaaaaagtatattagttactttagagcaatagaaaaataactggttaacatcaggttacttcaggctaccttttttgtgtaaggatgaaagcagagggaacttcatcatcacactgattgaagatttaagctggctgcttgtctctctcctgatttctggaaaggtcagataacaacttagcttaggttcagtgacctggaactctagcatgggtgactccattttgattttcagtctgttctgttggggactagtgcaggagcttagtccaaaacaatggctggtaaggttgccagatttagcaaaaacagcaacaaatagtatgcccagttaaacgcgaatttcagatagacatcaaataattttgtagtaaaattatgtcccatgtttatctgaaattcacatttaactgggcatcctgtattttatcctgtattttatctaaattctgtgtcactccccaagaaatcaacttgggttctgaggccatctataaaaggaagtttattaaagtggctttttaagggaattttttttttaaatcagagaaactcctttttccatgatggaccccaagctaatgaataggcttttaaaatagtgagtgagaggtttacaacacttaagagacagacattggtgagaagggcttttcagcaaagtcctataattgctgaatgggttcttcctgctcgctgcacagacaaaaccagttcactgagactgcagtattgcagtagagaaagagttttattaatgcagagctagccaagtgggctaggtggagttattcctcaaatcagtctttctgaaaacttcagaaaccagggtttttataaatactttggtgagcagggggatagggaatgggtgctgctgattggttgggggggtgaaatcatcgagatatggaaaacagccccgtgcactgagtctgcctctagatgggagccacaggaccagtccactcatgaatctttagtccaggcggggtcagttggttgccaggatgtgaaagtatgaaaaacatctcaaaagatgaatcttaggttctacaatagtgatgttatctacaggagcaattggggaaattacaaatcttgtgacctctggccacatgactcctgagcagtaaggaattaccaaaactacacctgcattttagcataattcaggcccatcccataatcctaacctcatggactttcattaattttacaaaggtagcttcagtccctgagcaaggagggggttagttttagggagtgattattatcatccttgcttcaaagttaaaatataaactaaactcctctcgtggttggcttggcctatacccagaaataagcaaagacaggtagccggtgaggtcagagtcaagatggagtcaaccatgccagatttctcttgctctctaatctttgcaaaggcattttcagtcccttaagatcacattaaattaaagttagataccatcctcaccgatttctcagcttctgatggttaactgttcaagggtcagaggagagattcaaggccaagggtgataagcctcctagtgtccatgtagatataacctaatctctactttctcctggagatgatccatctcctttttctaatcaagataatgaacaataatgaaatgtgtattcgttatttatcactgtataacaaattattccccaaatttagtggcttaaagaaacaaacatttattatctcatgtcttctaggataaagaatttagcatagctaaattctagctctgagcaagagctcagaatcttgcaaggttgaaatcaaggtgtcagccaggactagagtcacctccaggctaggctgagggaagattcacgtccaagctcaccacaagcttgttggccagatttagctccttaggggctgttgatttaagggctttagtccctcactggttattgcctggaggcattagctatgtgattcaatagcttcgctccatgtgggcctctccattgggaagctcaaaacatggcagctcaattgcttcatcagagcaaacaagtgagagatctcgaaactgaacaacacagaaatcatttataacctaatccgaaaatgacatccaccatatttgccgtcttctattcattagacgttgctaagtgatacttctagtgacatctagaagagaagaggatgccactaggccacgaataccaggagggtctcagtgtaatcagactttttatatgaaggctcagggatccaggcaccagtattccagtgacccagcctcagaagttacacagtgtcactctgcaggctactgatcaaaccagtcacaagcccacttttatttcaagggaaggaacaacgaattctggagccatgttttcaaactgccccagctattattatttttgaaactgtgcaaggatcccctggttcagaggtcttatggatgctgtcatctttgctgagatacctgcttgtgccttcagcatggaagaatgcctgtgtatccacctgtacggtaggggtcgctgtgactttgactggtgagggtacagccactggtgcacatgcaaaggtgcctatctgtgaacacgtattgagaggctggataaggctgcgcccatgtgagtgctgggcttgtacgtgcatttttgcctgagtgagcattagtggcagtgtccccagcctacccctttcctgaatcccaggctcatagccaactgcccacctatttccacgtggatgcctgctgagcacctcaaatgtcacacagccaagacagaactctggatctcctttcccagccacaagctgcccctcttccagtctgtaagttcttacggagcatatatatgtgatctgcctacttttctccaacctcaccacagtgacatgagcccaaaccaacttctcaccttgcaacagcctcccaggtgggaaggctgagtattctggcccttaaccagttagaactccccagttatctgtcctgctgatggggttgaaatctacattcctgaccctggcccaccaaagcccctcccttagctcccatctccctcctctctccctgtcttctcctctgctccagacactctggcttcatttctgcgttttttgtaccccataagctccttcccaccccggggcctttgcctttgctgttccccctgcggggaatgccggatctctgctcagatatcctcttctcagatcagcaagctaaagcagccacctgtgtctgcctaacccaccaccgtagtttaactttctgcctagtctttatcactagctgatatttctcaggatcctttagttacttctttttcgtcttcccctcctagaatgtaaactcttcccctcctagaaggtaaacaaaagacctgttctgttttgttcttcggcccatcccaagcctagcgtagtgcctggtatgtggtggtgtccaaacccaagcgtggagtgaatgagggatgaatccatgagagagtgagcggctccagtgggtatgcgcgagtgtctcactcggtgtagatgtgtgtgttgtgtgtgttgtgtgtgtgcgcacgctggggaggccagacaagtgtggaccagtgattggggcacctcttccctgcaaagaggccaggggaagacagtgcgtgtggggtcttctaccagggaggatggcttgctggtgtgtcccccccaggggaggactaccaacgaaggggacccgggagatggcgggtgggggcccccgggaggacagtgggcgagggagggggtccttgccaggcctggggcggccgggggcggtcctgggctcccctccgtcccgcctccaggcctcggggcctggctggccgacgtggcgttggcggcgctgcgcgcgggagggcagggcaggagggacagaggcgggggcgggccggaaagtttgtccggcggcagcggcgttggggactccggcgggggatgcgcgcccggcccctcagcgcccccagcacgccgccgagtcccgctcgccatgggtaagtcccgatcgggcgctgcctgctggaagcccgaccccttcccagggtgtagacaccgcccccacgctcccctaagagtgcgcgccccctggctcccccagggccgccccggccggataccgcctctcgggtggccagcccgagactgcaggcctgcggcgggggctgggacggggctcggtcgcgcttccttccatcttcctttctgccccggaaaagtggcccctcacttgctgcagcgcccactcgggcccaggcactctcccgggcgccctgatccgacagccccaggcaagtgcagctgttcctggtctgcagatgaagaaatggaggctccgaaagaagcaaagcagttcatcgattcgctgagcgcggttgtgccccaggcgctgttgtgggcctggggacgctgtcgcgaacgaaactgcgaacaaaacagacgaaccccctcctctggacgtgattctgcagagaggggacagagaaggagattctaacacagcattggggtgggacgcgtggggaatggctttgttgccactcgggactagggctctatttttctctctgcattcagaagcctcgaaggatcagtcgttgattcttgagtgagcacctactacgtgccagacattgatataggggttagagcttcagcaatgaacaaaatagacaataaacctctctctcatggaggtggcattctgattgagcagctgggtaaacacgtttatgaataacttcagagagagataaggtgttgtggaacccataaaatggggtggcgtgaaggccaagggcgtgggttccttgggtaggtggtcagggtgggttttctggagtaggacgttttggagctgagaacttcctcagaagcgggtcttgctgagatctggagaaagagcttccaggtggcagcaacagtgcaaaggccctcaggcaggaatgagtttgtgtggcccaggccaggatggccagagcacagcgggcagggcactgaggtcaaagggatggcagagaggtgtgcagggctttgtaagccgtggtgagaagttcagattttattgcaaatgccacggcaagctggagaagggttttaagctggagcggggccgtgacctgaattatcttttcttttttttttcttttttttgagatgatcactctgtcgccaggctggag[141 bp omitted]ttcaccatgttggccaggatgtcttgatctcctgacctcgtgatccggctgcctcggcttgggattacaggcgtgagcctccgcgcccggccctgaattaacttctcaaagtttgctctgagtcgttctgtggagaatcacagtcgctaacactggctatgatgtaggtaagcatagaaggtaggcattaatatcccatttgtagatggggaagcccagagaggtgaggtgagttccccaaggtcacacagctatggagaggagaagctgggaaggagccccagcattctgactccagtctgcattcctaaccactgcaccacgtggcctgtcatggtggattaatggtaaaactggtgaccagttccggctctgacaggagagtccatcctcttaacccccacagcacagtgccccagagcctgagaaaaaaatgaggcccagagaggtcaaggtcttcttaaggacactcagcttagccctagccccttgttcctgcacctcctattcctgctaaatcaacccaacagccatttgctgagtgccttctatgggcagagcgagggctgggtgttagtgctgggggaggcataagtcatggctgcgggtctctgtcctccccagaattcttacacagcagggaccagggattgggctctctttatagcctctgggggcagaactgggttctagacccaattcctctcactttgttccaccattccactttgacctgggagagtctgccaacttctctggtcactatcaaatacccttatcacagggtagccatgagaatgatgtgaaaaaatgaattacagtgctcggctcatcacctatatctggtaaatggtgagtgaatgtgagtttttattttatattgcacccaatattgggattctggagtcagactgcccgagttcaagttcctgctatgtgacttacaaactgtgccaccttggggaaatgtcttcacctctcagtgtggtggttatttctgtaaaatgggaatgacaatagtgattgtcataggattgtctagggattaagccagctggtacagatactgccccttaggagagtggctggctatagtgggtactccaagtatcagctgtggctgcaattgctgggacatttggaagccggccatctgcaagaggatattcatacagttcaatttcacatctggcttctccctggagcttcagggaaagccacagcaggtctctggtgcaggagggacccagtgctctgtgacctctggttgagacactactctagtgtcaccaacgggaggcctaggacttgcagctggagatacttgcatcccaaaccagggttctcccccctccccctgccccctgaccctgtcccggggaagctgtgccctccacagcgaggggcttagaggattaagggatttcctccagtgtgggacatcttcactacagcctatgttaggcaggttattaatagaaaggatgcacacttgctaaacttaggtcaagccgtcttaatgtgttctccttaattttctttcttttctttttttctctttctttctttctgtcttctttctttcttttttttttttttttttttttgacaaagtctggctctgtcatctaggctagagtgcagtggtacagtctcggctcactgcaacctctgcctcccaggctcaagccatcctcccacctcagcctcccaagtagctggaattacaggtgcacaccactattcctggctcatttttgtattttttggtagagatggggtttcaccgtgttacccaggctgatcttgaactcatgaactcaagtgatccacttgccttagcctcccaaagtattgggattataggcatgagccaccgagcccagcctaagacatcttaatttgaggacgaggctttgctctgcttcctgtccatggccacttccaggccctggacctttcagatgttcatgagccaagatcctttctttctggatttcctacatccccacagttcatttggtttttcattcattcactcaatcattcatttgtttaacaaatattattgattgagtgctgagtaactgtccttggcctcagggagacagctgagaagaaacaaaccactcctgttcccttgaggctgactttcaggtcagggagaccaataaatatgtaaaatatgtagttattttggaagatgagaagtgccacgcagaaaaaacaagtggagaagggaatacaaagtgctagatgctacagggaggttgaattttaggtagaaggccagggacagcctcaccgagaaggggatgtttcagcaaagatcagaagggaggaaggaaggaactgttggcatggagggacaggacttcccaggcagagaggctggcaggtaccaagctttgagttgggacgtgcttggagtgagagtagcagcaaggaaccagtgtgactggagcccagtgagagggggcagatcctgcagagtcttgaaggccacggtgaggacgttggcttttcttagactgaaataggagccttggagggctcctagtggaagagtgacgaggcctgacttaggttttcccagaatccttctggctgctgtgtagaattagtttaggttcagaggtatctgacacagccctagaaatgtcatgaggtgaaatagccctggtcctctacccagtcatttgttcattcagcagaaacttcactgggttcctcttgggtgtcagggcagggctggggccccggaggctcaggacgagtcagtctctatccctgccctccttagttgaatatggaagactcataaaggaacttgcagtgtgaaggaaaaagagtacagtggagagttgaggaagatgcatgggaattggtcaggaactccctcaaacttttccactgaaaggcactaagcaaacatcactgtctgctgataggaagggtacttgggtactgagattaaaaaaaaaatgacaggccaaccttcagaaaatccagaaattggcaatgagtatttatgggtcactgaagtctatggcttcaggtgcagttggatctaggggctcatacagtgttgtcaggaatccttcattggggaagatggcccccagtggctccaggcaagtaaaacaccagcttggcacccctggtgagcaaacacacccggtccgactctcactggcccaggttcacccacgtggtattcacctctgcctagggcccaggaatttgctgattgattggatctggatcatggacaccaccctggggctgggcactgagggtggaggtgggggcagtcatctccacccaaaccaggagactgtgagacaaggaaaaggggcggctccctgcaacggaagatgaggagcggatgccaaataacagatgtgtatacctggaggctccttggggaggtggcacaggacctgggactgaagagggagagtagaggaacaaggggaccctttccttggggaacaaggacagtgcacgtaggaggcccagcacgtgcagtggtggagcggcatgaaagcatacagtatgtgccgggaacaaacatgttggcaaggtgtgtggggcggggctgtggcgacagagtccgggaggaggcgaagtggctgaggagttaggccagcccatgaagggccttgcctgtcatgctaaggtggtgggactgactcaggtgatgggaaccatggaaagggaatgttcttcctcgtcttcctaatggctccaactcctttgaggtcctcctttatatctacagtcccatgccacagtatcatttcaccatgctttatcccttggggttttcctgagagctctttcccctccacctctgcctcctgcaccccagtttcctcccaccgcacctatctctgattgactcttcttgctgggaggtcagtgcagcggagctcttaaggacatgggtttgggaggcaggcaggtcagcatttccatcctgatcctgttgcttcctagctgtgagaacactctgagccttaacctccacatctgtaagatggaataattgtagcagtctcacctagggttgttatgaggatgaattgagggaaggaacataaagtcttcacacagaggaggtctccatacatgatagctgttattattactgttttatttcacgtttgtttgtttgtttgtttgtttctattgtccattggccttattgtccatttcaactgaacctgcactgatgtgttttccagtggaacctgtgggtggaagctgtgagccctttggctgggttccctttcgctgcaagaggaacccaggaaatggcaaacaaatcctgggctttcacctcgattgcttcacatggcctggaaggaccttgctttctgggaaaaagcctcaggaatgagggaggaggggcaaaggggggcgaagacagagcaggatctgagcagcatcttccaggatgtttactagtggtgaggaacaggaaggacaggccagccagggagtggcaagggctcgtttccttggaaggtaggagtggcaggggagagggatgagcagaagtgggggtggagaatgattccttcacccatggaactcctccttctgcacaaaaactgcctaacaaagctaagaagggacccaagcaagagaacagagtgaaatcacatttcaccaaggttttataatggagcagtcaagagtagggactgtggacccagacagcctggctttcattctatcctcagctgcttacaactttttttgtttttttattttagagtcagggtctcagtctgtcacccaagctggagtgcagtgtcacgatcatagctcactgtaacctcaaactcctgggctcaagcgatcctcacacttcaacccctagagtagctgggactacaggtgcccaccaccctgcctggctaatttttaaaccttttgtatagagacaggatcttgctatgttgcccaggttgcacttactacttttgaccttaagtgagttgctttacccccctgatgatcactttattcattcgtaaataatacaagagcctacctcataacgttggggtgagaactttttttttttttttttgagacaggatcttgctctgttgtccaggctggagtgcagtggcacgatctcggctcactgcaacctccaccttcccggattcaaatgattctcccacctcagcctcccgagtagctgggattacaggtgcatgccacacacccggctgatttttgtatttttagttgagatgggttctcatcatgttggccaggctgctcttgaactcctggcctcaagtgatccgcccgcctcagcctcccaaagtgttgggattacaggcgtgagccaccacacctggccataaatgtgtttttaaactcaaagcaatgtctagtccagagaaactctccatacatctggctataatattgcagatgtccttgtcaggtccagggtgggggtgcatgacatagatactgctggattattctagatgcttccagaaatatataaatttaagtgtgtgaattaaaaattaagagtaatctgtgcaactgtgctgccaatagggtagccagcatccatatgtggttatttttatatgtacactaatataaataaaataaaataaaataaaaaattcaggctgggcatggtggctcatacctgtaagtaatctcagcattttgggagactgaggcgggcggatcaccagaggtcaggagttcgagaccagcctggccaacatggtgaaacccggtctctactaaaaatataaaaattagccaggcttagtggtacatgcctgtagtcccagctactcgggaggctgaggcaggagaattgctagaacccaggagatggaggttgcagtgagccggaattacgccactgcgctccagcctgggaaacagagtaagactgtctaaaaaaaaagaaaagaaattatttcctgcatcccgttagccacatttcaagggctcattttctacatgtggttggctagtgactatcatattgcacagcatggttatagaaatttctgtcattgcagaaaatgctgtcagatagtgctgctctaagaagaaaggaaaacatagaaaatgtaacactcagatcagtgcgggaaaaaatggaaaaaaaacccaccccataattgatccatcaaaagcagaaatggaggtaaaaagaaatatcctgatagcacagtaaatagaagacaaaaagataaatggcagaagcaatttcaattgtatcagtcattgtaataaatgtggaccagttcacctttttatttatttatttatttttgagatggagtcttgctctgtcgcccaggctggagtgcagtggtgcaatctcggttcactacaacctccgcctcctgggtttaattgattctcccacctcagcctccttgatagctgggattacaggcgcccaccaccacgccaggctaatttttgtatttttagtagagatgggttttgccatgttggccaggctgttctcgaactcctgaccacaggtgatccacctgctttggccttccaaagtgctgggattataggtgcgagccaccacacacggccaagttcaccttttaaaagaagacagtcagattgcatctgaaatcatccagctgtatactgctttcacaaggaacacatgacaaatggttacagatctaacctgttgggttaaagtgctttgaaaatgcagacactgaggagggagcgctcactgtctaaatgtaggtgcctctggggtgaacaggtttcagaaggaggagacaatgtgagttgagaaaggctaaatctaactacagctgttgaaaataccttgactgccatgcatggtgactcacgcctgtaatcccaacactttgggaggcctaggcaggaagatcacttgagcccaggagttcgagaccagcctgggcaatgtagtgagaccccacctcttcaaaaaaatcaaaaagttagcctggcatggtggtgcatgtctatagtcccagctgcttggaaagctaaggcaggaggatcacttgagcccgggaggcagaggcagtgagccatatggtgccactgcactccagcctgagtgacggaacgagacctcatcttagaaaaaaaaaagaaagaaaatgctttgagctttctttttcctgtgtctgttcttatggcgccttcattattccctgtgttgtttggatttctgtcttttctccttatttatgcttaccaaagcattatctgttttcttatccatgtcaaggaaccaacttgagttttagcgatcaactatcctcttcttgtcgtttttccattcccttaacatctgttttcatattcactaattccacttgctctttgggttcattttgttctaattttcctagcttcttcacacaaagacttaattaatttactctcaggttcttttggggttcctgataaaatataattttcacttgattatctctttgaccacatcccacaggcccattttttatgtgggccttttattctcatttcattatttattacaatttttattctcagttatttttatcctcaattattcaagatttttaatctttattttatttattctcattcagtaggtggttatttctattttgtttcttctttatgccaagtaatttagatgtatattttatattttattttattttttaaagatagggccttgctctgtcacccaggctgggatgcagtggtgtgatcatagctcactgcagcctcgacctcctgggctcaagcaatccttctgcctcagcctcctgattagctggaactacaggtatgcaccaccacacccagctaatttttaaagaaaatttttctgtagaggtggtgtctcactatgttgtgcaggctggcctcaaactcctggcctcaagtgatcctcctgctttggcctcccaaagcgatgagattacaggcatgagctaccacattcggctttagctgtgtattttaagtttctccatgtatatttgggcggaggggggtgttgttgttactggttgttttttttttctctctgaatgaaaaagccatggttggaaaaaaaaaatgcttgtctgcaatgccaggaaccaacaggcttagttttgctatttggcctgttccctttgcactagatctgcagcaaagagtgaaatggagtcagcgtcttcttcctcttattctcttagcaccagctgttgaagggttatgttttgaaggtgtattagtctgttttcatgctgctgataaagacatacctgagactgggtagtttataaagaaaaagaggtttaatgaactcacagttccatgtgtctggggaggcctcaaaatcatggtggaaggtgaaaggcactttacatggcggcaggcaagaaagaatgaaagccacgtgaaagggattccccttataaaaccatcagatcttgtgagacttattcactaccacgaaacagtatgggggaaccacccccatgactcaattatctcccactgggtcccttccacaacatgagggaattatgggagctacaatttaagatgagatttgggtggggacacagccaaatcatatcagaagtggagcaggagatgacatcaaatttgtgttttcttaatcaagtctggcattgggcaggactgctacaggtggtaacagcaatcatggtacttctccttgagcatacttcctgagcctcctttctctactgaactcttccaagagccagtgagaaaggatttattagccctgttttacaggtgaggaaacgagttcaaagagaagaagcagcttgcccagggtggcacagagcaagtggcagtgctaagactggtactcaggccttttcagtcctagtcctcattgctttacactgtgctaagctgtcaacacagcagatcatataacaacttagaggaacagcatccattgtttcattttatcttcccactggctctgaaagcaaacaaggtgggtattattgtccccattttacacatgagcaaactgacactgagagatcagaagtaccttggttcaagtgcagctgagaggggcacagagtgagatgaggtatgcacagatacacaagaaagaagcttaagaatgtctttaataaccacagctctcggatcactggattcatgaggactggaaggggaaaagaagcaaatggcaagaaaacagatctaccaaaaacaaaacaaagcaagacaaaaagcctctcacattcttacattcagccaaggattttgtaccttcttcactagtttgttcattcataaaatgggaatattgaaacactaatttctttggatttaggaagaatttttcagaattattatttttgagctcctcctttactacccttttcatttttcatctttagccaatggtccatttggatataaattaaactaatctaggactaaaaacctcacattgtaagatacggaagtcagaattattgtgcagtttggtatttcctaagtaatgaagtagttgggtcatggcgtgctttcctgattcccacaaactgacccttgtgctcgctcgtcatgtactcaggaatctttattccattttaaaggagaaaaatgtttgaatggatgctttatatattggtatttttaacacacagatgttgtaacatctttcattaatgtgtcaggagccctttggaagagactgatctagtaacatttcctcattttatagatttccttattttatattcaagttatctattgctgtttaacaaaacactccaagacttagcatcttctaataataatcatcttatatctactagttctctgggttgaatgggctcagctgggtggttcttctgcagctgtggttggaatcatctggaggcccctgtctgttgcctaagggtctctccacacagtttttccatgtgacagtgtagccagatttcttacagagtggcttggggctccccaaaaaaacataaaatgtggaaattgctcaaggtttagacccaggactgaacagtgtcatggtagccatattctggtggttaaaactagtcacagagctactcagattcagtgtgagagggaaccacataaaggcataacaccaggaggcatgactcattgggagccatctttagagaccagctcccacagcccaaaaagggcaagtgactggcctggtgtcacactgcaagttagttaccaaaacagaaaagaaccttgttttgcaaatctctaaattattgtcctgtcctcactactatatatgtgtaaaaatgacttgggggccctacaaatccctcaattagcaaaaaaaaaaaaaaaagagagagagagacattgcaggtttttccatgagtctggaaattctgttgctcagtgtactaattgggagcttttaaattataatttacagaaaccaactcaatctgactaaaagaacaaagagtattggttggctcatgtaacgagagcccagtggattgggtaagcttcaggcactgctagatccatgggttcatgcaataatattgggatctatttcttgttatcttttggctctgctctcatctgtgttggtttcattttcataaaggccttctgcacagcatgaccaatgactattttgtttctgtaacttgaaattctcaaaaaatgtagttcttttttcttgtctatgtatagcaattccctgagacccacttgctcatccctatgtgtgggtggagagtacatgtgactggtaaccccatcagtggggaaggggctcttcctcaaaggaaaagattccaggcagacagaagaagtaacaaatgtttactacacccagaggcttgtattccttgaagatttgtttccatgtggaagcagttgaaaactggtacctatgggttgcactctgagatgtgttttgtctgactcaaagaatatttttatatattcttggaacagcatttaaaaatcagaaaatagtttataaaaatctggatttatggtttctctttaaaaaaaaaaccagatctggcagttcttgaccttcctgttttccaatttccttatctgtgacatggagatattagtaatacctaactcgtgaggttactgttccatggtgagcaggtctatgcaaacctacctctgaaggctgaggagctgagaggccaaagaaagaggctgacaaatccagtcttgcagaaagaaatttcacagggacataaaaacaggagccatatctcaggtagccacaagaccgtggattcccatacctgacctccagaaagtattcttaatatatcaagcttttagcataaaacatgtgcagctgatcatgtcttcagactttcttgccaagacttgtgaccactggagaggctggataagcatctttatgaagggttatctatgctacaggcatttttaaagaacttactgtagaacaacttggtatgtggggcccaaatatccatcatcatggtggtttcacttcaagatggcctcactctggccatgcaacagggtgttttcctacagttgtgaggattacatgaaatgatgcgtttaaagtttctcacactatgcctggcacatagggatcagtcatgaaatggcagttactcttctaataatttgcctgagattatacagtcggtgtgttaacaatacctggagctgtgttgtgactttagatgaggcatgaactctccagtttggcaatccccaccattctttgttgtctcacatgcagcccgtgttcctcattgatcttaactggcagctccctgctatatagcatttcttcttagttttcgttagcactcttacctggacccttgtactagccttccaacctgggtttgctcttgctctttggtttcactgctaggaatagaaactggaaatagcatagtttcactaagtcagaaattgttgggattttcttcttagcacataaaaatatatggagattgacaatccattgttggtatggtaggcttactgccatcagggacccattcttcttctatatttccatcctactatgtcggtgtgtagcttgcatcctcatggttaccccccatcatgttccaagatggctgctgaagctccagtcatcacacctgcattccaggcaagaggtaagggagctagaaaaaagggcaaaaaagatctagccagctgtttccctcctcaccctcttcttggagagcttttttcaatgtcccaccaaaaaaactccctcttccatcttagtagccaccaatagctgtgggaaaggtgggaaatgtagtcttttagctggatgtagtcctgataccaaagaaaaaggggtgaatggacattgattgggccacattcacctcatttagcatctccatacaacagcaagagcaatattttaaaaattaaaaatagatgaccgatttgtttcctgttgggactcataaaaaatgaaaaataaaagtagatcacctcattcctggctgaagccagcaaaggcttccaaccactgagaatgacattcctcattgtcctcttgacttgcaaagccccacatgatctggcccctgcctatttctcctgcctcatcatctcccatcactctcactcactgggcttcagcctctggcctcctgtctgattacctcagtgattaaaggtcctcactttagccacatcatctctacaacttacttgttatgtgaccatgagaaagtttcttaacttctctgcactttggaggatgatatgttatagggtagctgtaacaattaaatgagaaaatacatataaagctcttaaaacagattctggcatttagtaagggccatataagtactaaccattaatatccatagttgttcaaacaccaagaactgtcctacctcagggcctctgtactttgtgttcactctgtctaggatgttcttctcccagattttcctgggactttcatgtcactcaaatctctgctcaaatttttgctcttcagagaggccttaaaatagtactactccatcaaccttaattctccttccctgcttcattttttatgacatcttcactatctgaaattatatacttatttatcatcttcctatttcttctagaactttagatcctggacaacacatctgtattccagccctaagagcacttcctggcatgttgtaaatgccagataaataaatttagatggatggatagatggatggatggatggactgatgtgtggatgagtatacaaagggatgaaatacagagatgggtggatgaatggatggatttgtagatagactgatcaacaaattgatggatggttgggtgaattaaggtatagataaatggacatgcagatggatgaatatttggatggatgaagtagatgaatggatggaggatgcatagatggatggatgggtggttgaatagatggagtggatggaagaatggatggatagttaaatggatgattgaacagatggtgtagatggatggtggttggatggatggatggatggatggatggatggatggatggatggatggttggagtggatggatagatggatagatggatcagtgaatggttgaatgggtggttgaacagatggagtagatggatggaggatgaatggatggatggttgaattgatggagtggatggatggacagatggaaggatggatggatggatggatggatggatggatggatggatggttgaattgatggagtggatggatggacggatggatggatggatggatggatggatggtttgaatggatggttgaatagatggagtagatggatggataaatgaaggtgttgacagatggagggaaggttgaatggatggatggtatgacaaggaaccattctaactctgtccctctcacttttgttttttaggccactccccacctgtcctgcctttgtgtgcctctgtgtctttgctgggtggcctgacctttggttatgaactggcagtcatatcaggtgccctgctgccactgcagcttgactttgggctaagctgcttggagcaggagttcctggtgggcagcctgctcctgggggctctcctcgcctccctggttggtggcttcctcattgactgctatggcaggaagcaagccatcctcgggagcaacttggtgctgctggcaggcagcctgaccctgggcctggctggttccctggcctggctggtcctgggccgcgctgtggttggcttcgccatttccctctcctccatggcttgctgtatctacgtgtcagagctggtggggccacggcagcggggagtgctggtgtccctctatgaggcaggcatcaccgtgggcatcctgctctcctatgccctcaactatgcactggctggtaccccctggggatggaggcacatgttcggctgggccactgcacctgctgtcctgcaatccctcagcctcctcttcctccctgctggtacagatgagactgcaacacacaaggacctcatcccactccagggaggtgaggcccccaagctgggcccggggaggccacggtactcctttctggacctcttcagggcacgcgataacatgcgaggccggaccacagtgggcctggggctggtgctcttccagcaactaacagggcagcccaacgtgctgtgctatgcctccaccatcttcagctccgttggtttccatgggggatcctcagccgtgctggcctctgtggggcttggcgcagtgaaggtggcagctaccctgaccgccatggggctggtggaccgtgcaggccgcagggctctgttgctagctggctgtgccctcatggccctgtccgtcagtggcataggcctcgtcagctttgccgtgcccatggactcaggcccaagctgtctggctgtgcccaatgccaccgggcagacaggcctccctggagactctggcctgctgcaggactcctctctacctcccattccaaggaccaatgaggaccaaagggagccaatcttgtccactgctaagaaaaccaagccccatcccagatctggagacccctcagcccctcctcggctggccctgagctctgccctccctgggccccctctgcccgctcgggggcatgcactgctgcgctggaccgcactgctgtgcctgatggtctttgtcagtgccttctcctttgggtttgggccaggtaagtggagttttcttgcaggtgactctggagacttctacccctcctagggggaagtttggggacttcccaccctgatgacctggcagggtgtcagtggggcactagaggtgggttgaccatgaagcctcagggcccctcacttacctgcagttgctcctcccagggccagtgcctaattttatgtttgtaatttgtattccttaaaagcctccccaagtcatttgagcttcaggtcccttaaagcccggatagctcacaactggaaggaatttaatgaatagcgtgaaaaccaatcatcccagttcgtccaagactgttcccatctcggcattgaaagtctcatgtctcagaaaacctctcagtcttcagcaaactgagactctactgtaattcttatagcagaatgggagtgggagtttagtatcaggagcctgacactagaaaatcccattgttgagaggctgcatgtttgacctgatggtgccaggccccaggtcccaccacagcccaggagccctcctgctctcccaccctagtgacctggcttgtcctcagcgagatctaccctgtggagatacgaggaagagccttcgccttctgcaacagcttcaactgggcggccaacctcttcatcagcctctccttcctcgatctcattggtgagtccttcccagacaagtccgttttttttctgtggcccaagctccctactctaaagcagaaatttttggattttcctatgtattagctgcagaactattattctgtgcagaaacatcatcaaatgtccaagacgacatccaggaccctcatatgcactgtaaaactccccaggccagctaatgggtgatggtctacacccagtactggtgagaggtcatctgaggtcaaccggcaggagtaagagtagcaatgtttatttgctccaaactggcttaaactggttcatgacacctgccaggtggaagtttttcttggcttttcttttctttttaatttttaattttttttgagatggaatcttgctctgtcacccaggctggagtgcagtggcacaatctcagctcactgcaacctccacctcccgggttcaaactattctcctgcctcagtctcccgagtagctgggactacaggcacccgccaccacgcccggctaatttttgtattttttgtaaagacagggtttcaccaggttggccaggctggtcttgaactcctgacctcaagtgatccacctgtaatcccaaagtgctgggattacgggcatgagccaccgtgtctggcctggaagtttttctcaaatcaagtttgggtgacatcatctcttcctccctagcattgaaacccattctgaggtgtggtgggatggggtggaaatgatgtgggcccagaacaccagggaatgactctgagatgctgagatgctcatggctccaggccctggtcttcagtgggtattgctcatctgggccagagtacacaggctccttcactgtggtccccaaggcacagttcttagggttcagttattttcctattccctatggccaagagtttccttcccaaaggtgcagccaacttgggaggctggggggcagtgctgtgggaaaccccagtggaagaaccccccctatcatggctgtcttccaaccccagtcttagggaatccaagcttctccctgcagcctcagtcttcaagcatttccctttgtgtggagtaaatgagtgagagaggagaaagaaggagagaaacaaggaagggaggaaggaagggagggagggaggaaggaaggaaggaatttattagaattgtgtcatatatcatccccatttcacagatgggaaaatacatccttaccccgtccagccagggagtcaaaagactagaaccagccccactgccttccagcccattgctctccctgctggcgataggtccagctggtcatgggaggctgcctaaaggaggtatggacgtggctgtcagaggtgagaatggcttccaaaacataatttgtcttccaccttgacaaagatccttcctccacagcctcttctctgtcttgggatgaatgacatcaaatgactcagggtcattcccatcttggctgctggttctgagacccaccggaggctctaggaggaggctgactctgggactgaactgtggcttttgtcctctctcccaaaccagtcacaggtcaaactggctgaaactcaattctctgaatgatcaattcactgaatgaccgattcatggaatttctgggtgtgttttttttttttttttttttttttgaaacagggtctcactctgtcgccctgagtgcagggtggagtgcagtggcatgatctcggctcactgcagccttgacctccggggctcaaacaatcctccagcctcagcctcccgagtagctggggctacaggtgtgtgccaccatgcccagctaatttttttattttttatttttagtagagacagggtttcaccatgttgcccaggctggtcttgaactcctgagctcaagtgatcctcccactttggcctcccaaagtgctgagattacaggcatgaaccactgcaccaagcccaattcatgaaatttctaaggattttttttttttcaaactgagatttgccaaggccgtgtccatgcagctgtttggccactcagctggatccacgatccctcaggccaggctttcggagcccaagcgtgctccacgggatagtgctctagatgtgggtgaggggcctttcccataaacacaagttgcctttgtctctgtgcttgtggacttgcgtcctggctcatccccgcctttgagacaatcagcgagatttccgctttaaggtacttcactgacagcttattggtcactctgcaaattgaccaacgggaacatttgctttgagtgaactgactttccatgcctgacctagaacctaccagttggcccaggctgcggggccagagtgcttggtcctgggcctacactcccgccctcctgtttccaggcaccatcggcttgtcctggaccttcctgctctacggactgaccgctgtcctcggcctgggcttcatctatttatttgttcctgaaacaaaaggccagtcgttggcagagatagaccagcagttccagaagagacggtaggaagctgacagggtgggtctgggggaagagctgtagcacaccccaagcacacagcttcaggattttagtctttgtgctttccttttgcaagcgggcattcctcctgtcttccttattgcctgggcactatgagttttttttttttttttttttttttttttttttttgagatggagtctcgctctgttgcccaggctggagtgcagtggcgccatctcggctcactgcaagctccgcctcccgggttcacgccattctcctgcctcagcctctccgagtagctgggactacaggcgcccgccaccacgcccggctaattttttgtatttttagtagagacggggtttcaccgtggtctcgatctcctgacctcgtgatccgcccgcctcggcctcccaaagtgctgagattacaagcgtgagccaccgcgcccggccggcactatgagttttgtccggtcacacacaaactgttttccttgagttgttttgtgtctccctacagtgccttttcatttgactttaagacccagctcatggggatttaaaaatcatttgattatggaatcacaggaggctagaagagtagaatcttaaaaccataaactatcttagagtcacaggaccttggagtagcaaaatatcataactatggcctttaaacattgcacgcaaaacgcttgtgggcttcatgcattcattccgtggctatttattaagtccttactctgtgccagacagtgttcagagccttaggaaacatgctgagattaaggaagacaaagtgcctgtcctcaagagcttccatttgatgggggagggaagccaacaaatgcataaacaagagcgttttagttggtgatgagtaattaggagaaaatgaagcagagcaaaatatgttgagagggccaggttgacacaggaggaacaaagaagaaaggggttgtggctgaagtagagtgggtggtgagggagggaagtcgtctcagaggaggtggaatttaagttagtgagaaggaggcacccacgtaatgatgaggggaggagcattctaagcagaaggaacagcaagtgcaaaggccctgaggtgggcatgtatctggcatgtgcaaggaacaacaaggaagccagtgtgcctggaacagagggaggaagggaagagcgtggagggtcagacaggccagatgggtaggatcacatcaggtcttcaggttattgaggggagttcagaatcttagcatcatgagaccttaggctgttcaaataaaagaagagtgaaatgggagcttcagaaggaacttcaaagtgctacagtcctaagcatccttggcaaatatccccagttacctcttaaaagcaggtgatagtcaccagctcctgactgcccattctgtttctgggaagtcataaaacgttttaaaaaatcattctattattgactagcatccctgcactggctgctaagccccaccccaatctggatcctaatgtaagaacctgtgacccagtcctccccaccccagaatgttctctcctactttgttgagtggaaccttctgcagtttcggcaggcgcctcagcaacccagctgtattagttaggaaatcgatttggctgcttgaagtcgtccaaatgtcggttgggggtccagggttgggtggatgcagcatgccatgagctcatgtagggtcccaggctccttctgtcttgttgctctgccacctcttccatatcacctttcctgcatggcctaaggaggtgcacccccacatacctgccagaggatgggggaggggaaggggtgggcacagtcctcaaggtcacttccacccacatgactttccatagaacttggctacacctatatgcaggggaggccaagaaatgtggtcttcaatctgggcagccatgtgcccagctaaaaatcgagggttctgttactagacagctgcctggcatctctgccacactggttttcttgggagaagattccaaatccatcctctgggataaaaagcaacggaggcagaaacgctggtgggagccagctttggggtaaggcaggatgtgactgcagctgcggggtgtcagcctggacctggggttacatggggggagccaaggccagcccttggggactggaggctgggtctgctatgactctggagaagacaggaagttaggggtttttgtggagtccagaggcaggtctgtgttttatcatctctgtccctagagttcagggggctcttgatatcagaggccacagagagagagagaaactcgactttaggaacacagggaccagggcatgtccagggattttgacagcaggaactaatgggatagtcttttcagcagcaactattttcactcctgtgtcctccatacaagagccatggtcccaggagaaagtctgattggccaaggctggtttatgtgcccacctcctaacccctaacttagccaggatagggcagagatccttgattgacagtccagtcaagccacatgccacgttccccaaaaatgggaggcagatgccggtagagccgtcacccactgctgtagggctgacttattctgcatccctgtgcctcagatgtgcttgttggaaatggggacctacatcttatggatccagctcctctacctgctttaaggacacattagtaatacaaggggctcaaatcgtcttacatcaatcaatggcaattggttgccgaaatgttgtttattttgccttcttatcaggttatttctgctcaaaagagacctttaccaatccctcaggggatataacaaaaaaaattcaaaaattcctgttttatcccagtttctcaggaatcgattcattcaactttcagcaaatattttcaagtgccgggcactgtagtaggctctggggacagacccatgaccgggagagaccctgtctctggacttagaaggaagttacattttaatgtataggagagagatagactacaaaactcaaaaatgcacaaataagataattcagagtttttatatcatgaagaaaataaggcaggttaacctaccagggggtgaacagcagatttgggaaatggatagtttctttagctagggtgcaaacagctatgggtgcatttgtgttacaagtgtatcaggaattttcaacaagcacggtgatatttttgtgtatcggtttcactcactgccctgtttccagggcctagaacagtgcctggcactgtcatctttaatcatatctctggctgaatgaatgatgctcaaggaaggctgctctgagctgagactggaattacaagaaaaagtcaatggtttctagagctggaagaaatgttcaagcagaagaaacagtttcaagagctggaagaaatgttctaggtggagggaacagcaagagcaaaggcccggaggtggaaacaagttaggagttttgaagggagagacaggaggcctatgtggccaaggcgtgatgagcaaatgggactggaggggttggtgtgggggagggcagccatggtgagaagatgggatgttaggctgagcatgatgatggtctccttctgagcagatgtattagtccattctcacattgctatgaagaaatactgggtaatttataaagaaaagaggtttaattggctcacagttctgcactctgtacaggaagaatgatgctgttgtctgcttagcttccagggaggcctcaggaaacttacgatcatggcggaaggcgaagggcagccagcacatcttccatggcgggagcagggggtggtgctgcacacttttaaatcaccagatttcatgagaacgaactcaccatctcaaggacactaccaaaagggatggtgttaaaccattcatgagaagctgcccccatgatccaatcacctcccatcaggccccacctccaacacggaattacaattgaacatgagattttggtggggacacagatccaaaccatatcagtggagagtgacagatttttgcgtttaggaaggtcattgtagatgcaatggtgacaaggggctataggaggccagggaagacccagggagaccagggaggagctgctagggggtccaggtgagagaaggtggacatttgtaataaggcaggaggcaggaagggtcatggtaggagtgaaggtgggattgggtggtgggaaccccagtggaaggtccactccccagggacggccccaggccctgccaccccctgatcccacgcattctttgtctgacaggttcaccctgagctttggccacaggcagaactccactggcatcccgtacagccgcatcgagatctctgcggcctcctgaggaatccgtctgcctggaaattctggaactgtggctttggcagaccatctccagcatcctgcttcctaggccccagagcacaagttccagctggtcttttgggagtggcccctgcccccaaaggtggtctgcttttgctggggtaaaaaggatgaaagtctgagaatgcccaactcttcattttgagtctcaggccctgaaggttcctgaggatctagcttcatgcctcagtttccccattgacttgcacatctctgcagtatttataagaagaatattctatgaagtctttgttgcaccatggacttttctcaaagaatctcaagggtaccaatcctggcaggaagtctctcccgatatcacccctaaatccaaatgaggatatcatcttttctaatctcttttttcaactggctgggacattttcggaagggggaagtctctttttttactcttatcattttttttttttgaggtggagtctcattctgttgcccaggctggcctgatcttggctcactgcaacctccacctcctgagttcaagcgattcttgtgcctcagcctcctaagcagctgggactacaggcgcatgcaaccatacccagctaatttatttttagcagagatggggtttcactgtgttggccaggctggtcgtgaactcctgagctcaagtgatccacccacctcagcctcccagagtgctaggattacaggccttttgactcttttatctgagttttattgacccctctaattctcttacccagaatatttatccttcaccagcaactctgactctttgacgggaggcctcagttctagtccttggtctgctggtgtcattgctgtaggaatgaccacgggcctcagtttccccatttgtataatgggaagcctgtaccaggtcattcttaagatttctcctgactccagtgagctggaattctaaatgctggtctaggagctgtctccaggatggtgcaggatggctttgcggaaaggagatgggtttggaggccaacaaacctgcttgtcaatattgcctttgcctcttggcagcccttgaacttgagtaaataacaactccctgaacctcagtttcctcatctgcagaatggggataattatgtcccaggggtatatttagaccctgtttcctttcaggagggtccccagctggtccagggcctgggaaatttctacttatcctcattacccaggtccctcctttggaccctgtaaagggtcagggtgaatcagatgggggactgagcaagtagctatgactgcagatcatgtaaggaagggactgacaagaagctcccagatgctggggagaatgaagagctaaaatagatcctaggtgctggatgctttgtcatccatgcgtgcacatatgggtgctggcagagcccccaaggactctggcctctcgagttctcctatcttctccattctagatgcttcccttgtatccagtgatgtgctggagctggctttgccaagcttgtgagagctggttgctacattttcaggatttttacaagttggtaaacacagccattataaaaaattaaatgatttaaatttataattaagtaaattacattaaaacaaaaaaattatactcaaaattcattacttaattttactacctgttactattatctgtgcttttgaggctatttctacatagtaactcttatggagacctaggggagacaccgcgcatctcttcctgattccccactcaatgacatcatgttagtctttggttgcttaactggctgtggggagtgtttttgtatcacaaagattagagaggactacacatcagggcttgatttattgtttgttgattttctagacttcagaacatgctggataaaatgtcagtaatgcaaattaaactttaaagtatgtcttgtttgtagccaatacatggtgtatagcaccaaaaaatggagggattattcttccagtagttgaacactgtcatccgtttcagctgacagctgctcaaatcatttaagaaggagttctgacattcattttcattgttttacttttgtcttcctcactagtgtaaacaaaaatttcaaccagcattcatgccgaacctatacccattcttcagtgcctagctgtacagttatcagggatttttatttgtagtctaattttgtcaaatcatggccaaatcgcagtgatagttgactttggatacaaggtttggcaaaaaaaaaaatattaacaaaatattctgtaagaatcaattgtctatatggaatttaggataaagaatatttacaataaagaatatttacaataaagagtttattattatttgtaagttgtgtgcaacaaacataccctttatctctgtaaaatttatacacacaaaaattaacaaaagattctgtaagaattaattggctatatggaatttaggatagaatatttacaataaagagtatttacaataaagagtttgttattatttgtaaattgtgtgcaacaaacatatcttttatcatagtaaaatttacacacacacacacttttcttccctggagagctgttgttaaacatttaccagcacactactgcttagagctgtgcttgtggccccttcagatctcttctctctccagggacccataaacctcactcaattctcctttcctctcctatcagcctggaagaatgctctcctagtcctagggtgaattctccactttcttgctccaggttataaacttggggttcaggtagggaatataaatgagtgaagccatttaagacattagggagtagtggggtctgtggaaatggggaaacacagggtctgtctataagggtgactgaccctcaattccaactggtggctgccatgtgaccctcaattccaactggtggctgccatgtaggaatgtgggcccaatgtggcatggccgtctgtgttttcaacaaattccagaaattcacactttggtgcaaattttattgatttttaagttttggcagttgattccaaacttaaaaatagcttggaagttaaacaaaatactccgtggctagatcacagacctcagtctgtgcctctaatctctatgtttttccctctgagacattcctttcttctgcatatttgaggcacttggcttaatctccttaaagaatcatggcttttgggccgggcttggtagcctacacctataatcccagtgctttgggaggccgaggcaggtggatcactttaggccaggagttcgaaacaagcctggtcaacatggtgaagtcctgtctctactaaaaataaaaagattagctgggtatgatgacactcacctgtagtcccggccacttgggaggctgaggcagagaattgcttgaacccaggaggcagaggtcacagtgacccgagattgtgccaccgcactccagccagagtgacagagcgagactctgtctcaaaaaaaaaaagaatcacagtttttgaaaaataaaatgccaagcaaactgaatacccaagcacttgaattgggtgagtgaaggggctattactgaacctgaagtataagacacctggagggaatgaaaatagtccacacctcaagcatcttatactggcacaattaggtgcgtgacttggggagttgttcatctctattatggggatgacactacttaactcttcagaaatgacacatgtcagtcacttagtgcagggttcatagtgggtgctcctaaatggctaactgtcccaacagcctccagggccatctggctttaggtaaggataatgaggccaaagaccaggtggtagtctggaaggggagaagggggcattaaagaaagctaaaaatttgggggacaccaactaggtgctcagttaggagggttttttgtttgtttgtttgtttttgacagggcttgctctgttgcccaggttggagtacagtggtgtgatcttggctcacagcaacctgaaactctggagctcaagcgaacctctcacctcatcctcccaagtagctgggactacaggcatgcaccacaaagcctggctaatttttaaattttttgtagaaatggagtctccccatgtttctcaggctggtctcgaattcctgggctcaagcagttctcccacttcggcctccgaaagtgctgggattactggcatgagccaccacacctggccaatgctcaaagatctttagcaccaaccagaggagagagacagtctgttcattggtctgcagggagagcactgggaaattcttctccttcccgcaagtaactccagaatcgcttcagggaagcagttcccaaacctcagtcttgtgcacagtcctttaataaaatatgcccatcacttagcacctttggttatttgccagattgtactacacagacttcttgctgaatgcttttcttcacatttatttgctattccacttaaataaatgtattttaaaaggaaactatgttaacctatttttccttcaaatgcatatttattgagtgtcttatatatgccagtcactgttctagaccctggggtcacagcagtgaacacgacaaggtccctgtcctcatggagctctagtaaaggagataaattctaaacaagagatggggaggaagggagggaggaaaggaaaaaggaaggaagaaaagaaaaaatgaatgaaacaaggaaggaaggagagaaggagggaaaagcaagtaggtagagagaagttaattagtgtgagtgctaacaaaagttacaaagctaaagagaaattgggtgaggttcagatgcagatgctttcatgccatgttagctagagtcgctagggcagtcaggaagagcctctttgaggtgctggcatctgagcagagacctgcatgaagggttagagtgagccatgggatgattgggtgaaagcatcccaggcagatggcacggcacagcacgtgcagaggccccaaggtgagactaagtttggcatatcagaggaacattaagggggtgtgagcaaagggtagaatgatggaagaagaggaggctgagcttagcacgggtctgactatgaagggtcttccagaccatggaaatccctcagattttattccagatgtgttgggaagccctgaaggggtgtgagcagtggactgacatgatctgacttgatgctataaaatagtcattggatgttggtgaacacacaaagtgaatatcaactgcagaaataggaagaaaacaataaaatactatgaaagcaacagattcagtaaaccctcaccagccattgttatctactgaagattctgaacctaaggtctgctctgtaatgaaaaggggagcttagcgggtgtgagagaggtgttcaggacatagtagcaacaactgaagactttctctttgtctggattgaaagaacaacaatgcaattcatcatatttatatggtgtttgtgaaccacctaaaatcatttccagtgctactggtattatgcttctgactctggtaaatacagctttaaggtgagaataccaaggaagtcacaagcaccgagagaaagttgacctcttgttactttctcatgtcagaccctcctagaaagaagcattgaccttcagcatggaactagtttagagtagagtgaagtccctgcagccaatgtccttccaggaagaagtaaataacatcctcatgggttacccttcaccggtctggcctctcccagttcctggactgtgaaatcctagaagcctatgtttcattttacttcatacaccctgatgagctcagcctcaaacaccactctttcaaggctgtatttcaaacatcctatttcctggtcaccgcatccttacatttctgctaataccttaatactgtctcataaccacaattctctgatctcatgaagacctctgacctctaaatgctaacccctgacctcacccctttcccagaatctatgaacctcttcctgccttcactttccttcttgtccatccaagatcccatagcccaaccttataatccatcctttgcaaacacccccttgtgcacttggtaatgctaatctcagatcaatttacacacccatcttctctgcttgcacgtgggctgtgaatgttgcaggagagaagtcacacaacctgacaaacaggtttcacttaaagtccatgagctcaaacctcagactcaccctccaaaccctctcatggcacacattcctgctccacaattcagcgatttgatatggtctccttgactgaaactgtcctgtctctttcatctccctcactctcagctgctaaccctgcctcatacttcattgaatgaacagaagttctcaggagaggtatgttccctgatatcttcatctcttttaggcatagtaacagagcctctgatgtttcgctgggaacatggctgcccagaccaaacaccgcatttcccaggctcctttgcagccaggtggggccatgtgaccaagttcagtctgatgtgagggaacacaagtgatgtgctccaggcaagccctatggcagagaagactagctgtccttggaaatttattctcccttgtttctttttaataatagaaatccctttgttttagctggatacatggccatctagctaaagatgacttttcccagcgtcccttgcagcaagagggccatgtgactaagttctggccaatgggatgtgagcagtagcaatgtggcatcttctgggtcatttccttaaagggaagatgtttgcatgaaatcaacatgcattttcccctttctgcaggccagggtgggtatatggtggtcagctttcaccatgaagacaaagacaaggggacggtggaacaagatggaaggtggctggatccatggataccttcatgaactaatgtatctagtggccctgtttcaacaccttctactggactgttatatgaaagaggaatcaactaccttattccagccaacttatgttagggtcccttttgttacagcgccttagcctgagactttactaatgcatagcctcagatggaatggaagtgtcctttcctttttccatcttctgttcttgttgactgaaatagaggtgtgttaggaaatcatctggggtcatgcagacaaggacaacatcctagggatggcagggcatcaagctataagaagcctggatccctgctgacatcacagagcagggctgccacattagccgggactattacgtgaaagagaaataccttctatctcgtttaagccactgctattttatgtgtctgttacttgcaaccaaacagcctgaccaatacagggggccactatcaaaattacagacctgtccattttctctgctctatcctgcatccttctaccgtgggaccatcctcttacctggactgctggggagataccatcctcacattacaccttggtgagcttctctgtctcctgaatcaccaacctcactttccgttggaccattccaagtcccttgttaatttcctccatgatacttattttgccttctaattattttgattgtctgtgtactagaattcaaattaaaattcttccacctctcctttccatcctttttctccatccaatcctcctttccaaaaatagtttgattgggaatgaggatttgagccagtaattctcatttatttgctccaacaaattcaacctctacctgctctgtgtcagcaggttgacttgtttgggctccatcaatgggctgccccatgctcagcttctggttgggttaggagtcctggcatttggtagcagggagggggaagaatgagtagagacgggttttcatcaggctcacgcctgtaatcccagcactttgggagccgaggcaggcagatcacttgaggtcaggagttcgagactagcctggccaacatgatgaaaacctgtctctattaaaaatataaaaattagccgggtatagtggcacacacctgtaatcccagctactcaggaggctgaggcaggagaatcacttgcacccaggaggtggagattggagtgagccaagatcatgccactgcactgcagcctggacgacagagcgagactccatcacaaatcaatcaatcaatcaatcaagtgaacatgcctaaagaaaagattaaattacctttttattgtcactgtagaaaagaatcttatgaaactgttatgagagaatctgcagccaaaaatggagtaaaacaggtgtaatagaggtgggtcaggccggtgatgatgatggtgatgatggtgatgatggtgatgatgaggatgaggatgatttatcacttattttgattttcaggtgcttgtggcatttgccacctttttaacatttccaacttaccatgattccttttatcactttaaataaatattcatgtccatacttaattttatatgtgtagtttgttttttcttaaaagaagtccttaacattaaatcagcctggatgagccccttgctggccagagaggtgctaggacagaggatgggaggtcagctgcaaactgagtgtcctcctgtccctggaggctcagcctgagttctcccccttgtcctctcttcctccctccactggccacttcaggatccagctggaagagccaaatcttggcgctcagaaggggttagtcacagggcaggctttgttgaaagcacctgtggcctcctaccttgggcaggagatttcctccaaaaccgcatcagggggaaatgtcagggcacctgaatcgatttttctgcgtaggagtgatttttattttttcctacatctcaatcgcttctaggattcaggatcaactaggattaactggaaagccctgaatatgtgtttgtaatggcaccttctcaattatctgccctctttaggagtggaatgtagggaatgccagaagcattcgaaatacatgtctaggttcattaatttatatggttaaaaggcatgggtgaagaaaaaaaagaccatcaaggctgtttggaccacacactcatccaatacttgactccctgcattacttagaaaacttttcgacagaaacggaaaccaagcagacttaagttacccgggaacccatttgttctggactaaaaacgtcatagttagtcctggtttcagacaggctcagcttgatccaggactaggatgatgatatttccttttgcctctgttctcagtcttttcctatcacaaaatctctcttcttccagcagcaactctggctatgcccttccaggttcacatagaggaggagagagggtttccttctcccccaagccccaccacatagttctagcatcccactggctctctgtgggttaaatgtgcctctccagacccactcatggggagcagggcgctgggagatgcagacgggcttaactcgagctgctggaggtggggcttgtgttggcttcctaggcctgcattcacatagcaacacacactgggtggcttaacacaaccgaagtttattctcacactgttctggacctgagaaatctgaaatcaaggtgtcagcagctccctctgaagactccagggaagaatccttcctcgcctcatccagtttctagtggttgcctgcagttcttggtattccctggctggcagctgcctcagtccaaatctctgcctccaccctcatgtggccttcctcccgccgtgtgtctcctctgtgtctctgtgttacatttccctcttcttataaagacccaagtcattggatggagggcccacccgaatccagtgtgacttgattacatctgccaaaatcttatttccaaataaagtcacattcacaggggccaggtagacatgaagtttatgacactgttcaacccagtacaggggccaatcaccccagaccctatggctgagtggggaagaagtggacaccataaggcaagttggcaagagaagaggaaagagatgctggaaatcactctgcacatttcccgtggccacactgcatcctgtgtccagctccgcttgcacacccccccagatgggggagtcactagtcactaccgagccagacaggctgtcactccggctggtgccctgcagtgtggccctgccctcgtgttcaccaggggttttatttgtggtcttggtcatgacctgatcgaggatcatggggttctcgggcacaaaactgaactgcgagaggagctacaggagggagggatgggggtgcagacggagcgcgtagagagggggtggcctggccaagaggaagggttcagaaggtgcagtcaggagacctgggtttgattctgctgcagctacttagctagttttgtgaactctggcaggggatttaacctctctgagcctcagtttccttaactgtaagatgtgggcagcagcagcccccaccccaaagggctgccgggcagattcactgagatactgggtaggaaagctctttcccagctgcgaagggcaatgcaaccacagggcggggatccaccaacacctttcccccagaagcagggcttcctaccccacccagggctgtccctagctcccgctgtcccagggccagactcagtttccatatttgttcattttactttccagtgtaaatattttttccatctgtggcagaggaggaggaggatggcattttgacgtgagacacaacattttcagacaccctctgaaagcatttccagaccctcacatgctgggtctcatccaaggatagaaaatgatttatcgtggatgctttggcacgtgcttttggagtttttcctcctaatgaaatgtttaactggaaaagctgacattctgcttttaattgattctcatgagatgagaaacattcccaggtaggttatattaggttgaaagtctcctattctaaatgaaattaaataacaaataaaattcagttcttaaaaatgattctgtttaacattttgaagggtggcacaccaaaacattattgcccatttccacattatagtaaactctaatttatttagttttgctttgtattaaaattgtattaaaatcaaaacgtttgttgacccaatttaggtcttccaagattatctagttaacatactctcttaatagtcacatgaattctcttttgttgaaatatttgcatttttagcaactgtttttgcatattaaatcacggctttcatagtgtgtgtgtgtgtgtgtttccactgaatttggtgcacaatgaagttgctaaattcttccagatttgggactgatgccatcctgcctctcctggtttgacaggttgggttgttggttaccgagatatgatccccaaagcttcctcttcagcaaaataaatattacatggatccttaagctgatcaatagaatttcaatatctaaagcaataaagagattaaaaaaataaaacctccaagttacctcttgacggtgaataacatgctttgtttgttttttgattagattgatagaagcccacatgactatagaatctctgatgtcacatagtgttaggcgcgccagaagtaactataaagtgagtatttctctttttgacttttcaaaagccaaagctagacctaatgccaaacagtgattattgtctggatactattgttataggaccaacagattcgtatacccactgtgcagtaacagacccattacaccgaaacagcagagatgaagcagggaaagagtttaatgatcacagagacatctagagcccaggtcctagaatgaaaaacctggaatagatctgaaccctaccagtagcctgaaccagggctgctccagccaactcacatctcagaaagcgagaaagaaacactaattaagagcctgggaggccaggtgcagtggctcatgcctgtaatctcagtttgggaggccgaggtggacagatcacttggggccaggagttcaagaccagcctggacaacaagatgaaacaccatcttaactaaaaatacaaaaattagtggggtgtgatggcacacgcctgtagtcccatgtacttggaaggctgaggcatgagaatctcttgaacctgggaggcggaggttacagtgagtccagatcacgccactgcactctagcctgagcaacagagtaagactctgtctcaaaaaaaaagaaaaaaaagagcctggggttgtttgtcatgcagcagatgctgactaatacagaatccaacaaggtagagagtgtttttacctggtccattgagtatagccttgtcatgcctgaaagccccaaattttaaaaaataataatagtaatccagtttttatattcaaaaatgaaaaatattgaaaaacataaagaaagataacatcacctatgacctaccacacagacataattgttaacaatatttttgtatatacccgtgtaatctcttttctctgatgacagatcaagttacctacataggaagatagtgaaaaggcaatcctatccttccaattgttcagatcaaaaactttggagggccagacacagtggctcacacctgtaatctcagcactttgagaagccaaggtgggaggattgcctaaggccagaagtttgagaccagcctggagaacatagtgagactctgtctctatcaaaaaaaaaaaaaattagccaggcatgattaattagatcacaggtgcacacctgtgatcctagctacttggaaggctgaggcaggattgcttgagcccaggagtctgaggcaggattgcttgagcccaggagtctgaggcagcagcgagctgtgattgtaccactgcattgcagcctggatgacagagagagaccctgtctttaaaaaataagcaaaactataaaccaacaaaaacaaacctcgcagtcacccctaactcctcttttgcactcccacatccaatctgttagcaaatcctgcaggctctgcagaatttgacctttctcatcatctcctccatcaccatcatcaccatcactccctagattgaggatgccactactttctaacaggtctcgttactttgctccttgccccctatctatcttccatgcagcagccataaggggcttttaaaacccaagtcagttcatgtgactcttctgagatggtctccccacggctccccctcttactcagagggttccttatcagaaactctcaggcccccaaagaacagcccagccttttcctccaatctcatcttttcccattatcctccttgctcagttagcctatcttttcccagtccctccaacacaccagccacgccctgcctggcgtccttagctctttctgtgtcgttggttaggaatgtgcccacgcctcatacttgtatggctcactctcttccatcaagagttattcaagagttatctgctctggaaggcttttcctggctaccccagctaaaatgtcacactcacatgagctcatacacatgcacacacttaatatgtacacacacacccctgcaaatgcatgcatgcacacacacatactgcacatttctttcttgctttattgcttctccttgaccctttaccaccatctaacatatgatacagctatgttgcttgttcatttaatatctatatcccttgctacaatattccttccccaagggcaggacgttttgcctgttttgtttactgctgtactcccggtgtctagaaaagtgcttggcacataagtagacaattaatatttgttgaataaatgaatgaatgagtgaatgtaaagtgcctggaacgctgcaaacatacaataataataaagcataatcattagcaccaaacaggtaaaagaaggattttcttcctttttcattgtagatgctgtaaaaagttgatagaattgaaaaatggagtttaaatatattacataaagtcattaaggccactggtaggagaattagtaataatctaactaataaaagcaaggagctgaaaggaataaggggcagtggagggaatgtatatgaacaaaattcctcatctcatccctggaaattgatcattaatacaacactctacatctatttcttaaagcagaggcctcaattctttggatgctggccctcaggtgtttttatttgttccagacattacttttaaaactttttagttagttgccaacctttgaaattcggaatatttcgcagataacttggtatttctggcttctcttgaaaatgatctggttatgattgtaccactgcattccagcctgggtgacagggcctgcattctgcaatagagccaccagatggcacagagtcacagccactccctttccatgccgcttgaactctcctgtttgctacacattaccagggcttttcactcctgatataaatgtttcatagaaacagtctctgggccgggcgtggtggctcacgcctgtaatcctaacactttgggaggccaaggcgggtggatcacctgaggtcaggagttcgagaccagcctggccaaagtggtgaaaccccgtctctactaaaaacacaaaaattagcagggtgtggtggtgggcgcctgtaatctcagctactcgcgaggctgaggtaggagaatcccttgaactcgggaggtggaggttgaagtgagccaagatcgcgccattgcactccagcctaggtgatagagtgagactctgtctcaaaaaaaaaaaaagaaaaagaaaaaaaagaaaaagaaagaaaaaaaggaaaagaaaacagcctgaaaaatagaaagcaagatttctgacagtggcaatctcaaggcagttggaagaacaggaaagactagctccccacttagaacattctatactgtctatgtgtttctgtgaattctcattcatgtcttgcttctataatgaaagggctatgacagtgaaagaaaaaaataaaaataatttttagtactttagaaaatactgaaaactataaagattaaaaataaaaactgcccatgtcctaccagttactaacaacattttggtatatattcattcacctactcttttgtctatgacaataaatcaagctagttagaaacgaggacaggtattgggatatatagacattctcacatcattgagaccacacagtatacgacacgctgtggcatttactttttgagattatcaagcatttcacatgaggctgagttcacaaatatattgtctttgccaaagttacaaacagtatccacgatttcccccagggtctggctttttgggtctggctttttctttacttctgaacatgtagaaaaatgaattatgtgcctaccaagacaacattgcagttttcctggcaaaggctaattctgccgatggaaacagtgttttcattttctttctttctttctccccaccattctatgcttttctggtttctctgtgtgcgtattttccccctggatttgacattataaagttgctaagttcttccagatttaaggtgctatgccatcttaaatctctggatttgacaggctgggccagtggttactgagatatgatccaagaagctttctctggggccatctgtcaatcagatgtcagctcataaggaggaagaacttggctgctggcctgcacttggatgccagagttggttgccttttgcttgaattgtgtctgcacagtgctaggcgcccagtaaattctcattgtatccctgatgggtgaaacctcatcaggtagctcttgaatggagatataaaatgtttgcctcatgtcaactcttcttgatctttttgacccatgtcttccgatctgaacagcatttaaaactttctcccattgtagcacctatggccatactaacttgtctgatcctattgtgggtgaatttttgaagacaattataaaccagcccacatgtcagtacctgagatttctagccttccagtgtcatccattctaaaacccgatttgaagatgcaatgtaggaaaccaagaactaccaccaccacaccctgtcatcgctgtacctttgaggtcatttactcagctttcatgtctggtatgttgaaagagtggaagttgggagttagaggggtgcaagtagcaacttgattttccctctcactgcccattcaaacacaactggtgggatagttctttactttccccgaatgatccattgggccgatcctttagcccttctcctcacccttagatcatgaccaataacaatatggtgatgattataaaaataaaatgtctccaagtcacttctgagtgtagcaacagtctaaatgaagtcattagaatgtcgagtcatgtcaaaactccaaacttcattcatattaaacctctttcctcctccactctcatttcttctcctccccagcccccttgggctctgaagaggtgaggagcagggatgttttacttggctggtgttgtgatgatgtgatcttgtgctttctggacttagagggccaattccttctttccttagcttgtgtgtcccaggggagggatggcggttcttggcaattctcccactggcaacctccaaatttgcttcctgggaggcaggcaatgtgtctcctctggcaggccactcttgagtgtgcctgcaggtcctgggcatcctgtggtccagcagccccatttgggcgcctcacattttcaggcagtcctgcactgggaatcccaaataaccccaggccagctgcctctggaggttcagaacctgctggaagaaacttacacctttggccttctctaaagtcatcattcctgatgcagtaatccattttcctgcagaggctgagcggccatggtccctaacttctacccatttccaggcatgggtttggcactagtctgtccagaagacacagggcaagctctttcggtggtttccccacatctctctgactcggcgttcggtgaagagttggaacggctttttctccagcataacgttggaggtgctaatggcaaggaaatgccacaggacgccaagtatcaatagtttctccaaagacgtgtctccaaacctgtattagtcccttcgttctcgcactgctaaaaaaaatacctgagactgggtaatttacaaagaaaagaggtttaactggcccacagttctgcaggctatacaggaagcatggctgaggaggcctcaggaaacttacactcacggagcaaggcaaagggaaagaaggaatgtgttcacatggctggggcaggaggaagagagagaggtgggaggcactacacacttcttttttttttttttttttttttttttgagatggagtcttgctctgtcgccaggctggagtgcagtggcacgatctcggctcactgcaacctccgcctcccaggttcaagctattctcctgcctcagcctcccaagcagctgagactacaggcacacgccaccacgcccagctaatttttatatttttagtagagacggggtttcaccatgttggccaggatggtctctatctcctgatctcatgatctgcccgccttggcctcccaaagtgctgggattacaggcgtgagccaccgcacccggccagcactacacacttctaagcaatcagatctgatgagaactcactcactatcacgagaacagcaaggggaaattcgcccccatgatccaatcacctcccaccagtccctcctccaacactggggattaccatttgacatgagatttgggtggggacacaaatccaaaccatatcaaaaccagtcctctctttcagcttctccaacctccttgagcactggggtaaggatcacaaaccaatttttttaccattgctttttgcaattcctgcagaggtggagggaagggtgcttgctacccactgggttactcctggcgtttggagcttcagccaaacggaagacagaaagagtcccatccacacgccacggctctcatttatcccttcaacaggcgcctggatcctccggttccacttctcagggtgttctgccttgcagctctggcagctgttgtctccagcctgcatcaactcaaatatggaaaacatccacgttttcttttcattttcttgccgctttctaacagtatcactcatacatttcagagagtcccatagactttccgtaaggggtggagtcacagaagcgggcatctgttgcttggacgccatccacttccattcgcctctaagctgatagctcttacggatctgctcctcagggaccccacccatctcctagttaaccaataagagcaccccacccccaccatcccagcaacaatgattggttcaggaatgagggcgtggccaaagctaagccaaccaaagccagtgatactggattctgggactaatttttaaatttcttaagaaaaactcttcgtactggattgctgagagaatgggatgtaaggtctgaactcatgtctgccttcatgctaccagcaaagagaaccttgaaaccaagtgccctgtatccagtaggtgcttaatagtagtttatcgagtgaaggaaataatggggaaaacatctgccaatgcaagtagtgccagtgcaatgattcaaagtggtactaagtgccccctggagagggctgcatacacatgcaattccaagtctaagaatgtatctcacagatacatttgcacatggacccatatcagtgttacggtgaaaggttggacaggttatgcactgcccaacattagtgtgcaccattcacatcaggcgggacagagtgggagaagataactttgctgtaaacctttgtgccctgtgtgattttttttttaccatgatcatatatagtttcttcagaagaaaaatttttatatcaaagccgaaactgtgcatttacatttctttatacattgcttggcacatcagtgctcaatatgtatcagctgtatcagcagccatcattattgttattttttaagctgttttgaaaaccttacggtgttattacaccatggagacacacgagggcgcgccaggcatctatttaaaaagtgttttcatagcagttcgtggaggctgtaattttgagtgtgtacaggagatgggggaaaaagtcttgggggtcccgtgtgggtgacaagggcaagtcttagttccaacttggtccagtctgccagccttgtcaatgaaataccaggactcccttcctgagtgctccatagtggaatcagggtgagcgtccactctttgcaagtccttagaggagagagctggctgagccggaggactggcccggggagcccctgctgcacccggacctgtgttctcatctgtgcagcagaaacaatcaaacccacctgcagggctatcgtgagattaagcagggtctctcagagatcaaaagaagcccgaactactttctagagtgaagaactggaaagaagagagagagagaaggaaaagaaagcctcaaacaatcaccaagattgaagtcactctcacaaggttaaattttacaactcacccctctgcctcatatacacggcaacctaacagtgccaggcagagatggtgggatttattttaaaacagtaacttatatggtctgatagaaggacccaagcttggccgggcgcggtggctcacgcctgtattcccagcactttgggaggctgaggcgggtggatcacgaggtcaggagtttgagaccagcctggccaacatggtgaaaccccgtctctactaaaaatacacaaattagccgggcgtggcggcgcgcgcctgtaatcccagctactcaggaggctgaggcaggagaattgcttgaaccctggaggcggaagctgcagtgagcggagatagcaccactgcactccagcctgggtgacagagcgagactccgtgtcaaaaaaaaaaaaaaaaagaaaagaaaaagaaggacccaagcttaataatttctttctgaccccttctgctatcagttctggcggtgcttctccgtgatttgggtataagcttattcgataaggttatacatatactcataagataatacacaaaagcatatgcagagggctgcggcagacagattgctggtctactggaaagccagctccccttcttggctaagagagtgcccaatgtgttccatgcacggcggatgacaatgtgcccaatggagagatgcttcagccccagccccagggcatccattgcgattgggctaagtcattcctttccgccagcaattgctttataggcaggcagatgccctggttctggccacagagacacaagtggatgtctcctgggagcttctgaaacagagtttttgtgtgtgtgtgataagatagagacacttgagaaacttctctcctgttggtcttatctttggatgttgtcagaacgtttggagctgcagcagccatcttgtgaccacaagggaaagaccaagggaattgtagagacccccatctttgtgtctgacataatcgagttgccaaattaaccagctcaattggtggttaattccattaatcctggaattatcaaattcaagatttctttttctttactttctttttttttttttttttgagatggagtcttgctctgtcacccaggctggagtgcagtggtgtaatctcggctcactgcagcctctgcctccctggcccaagcgattctcctgcctcagcctccttagtagctgggattacaggcgcccaccaccacgcccagttaatttttgtatttttagtagagacggggtttcaccaggttggccaggctggtctcgaactcctgacctccagggattcacttgcctcagcctcccaaagtgctggttttacaagtgtgagctacggcgcccagcccaaattcaggacttctgattatatgacatactttctaggaaacttgcagtttcacctcttttagatgacagattacttgcagtcaaagcccatgcaaacaacacaggcacatgtcaaatgcccccttgggtggaacgcaggaatttgcatttctaacaagctcagggggccacagtttgagtatcattgagcccagccatttcttggtctagagtaggagcctgcagaagggacagagctcaggggttaggcagacctgtttccagtttcatctgcatcccacactggctgggtgactttgcacgagggagtcaatctctttgggcctgagctgcttcattgctaaattgaggataataaaagaactcctggttttctcctcaaatctgtttctccagccacttttcccatctttgtacatgacagctccattcttccagaagttgagccccaaatactggagttaccctcgagaactctcgttcacacaagccttaccttcaattggtctgaaaaacctgtgggttctaccttcaattgtatgcacagcgagaccacttctcatcacctccatcactaccacactggtccaggcctgcattgcttcccgcctgggccgtggcagctgcctccttgctggtccctgactccacctcacccctgacagtctgtgcctcacacacagcaccagatcaattgctaaaataagtaagtacatcactgccttcctctgctcggctcccagagctctcacctcactcactcagagcaagaactgaaactctaccatggccttcaaagctcttggagatctggcttcctggtaccttctgccccatttcagctccccgcactccccactgtgctccagctgccgtggcctccttgctgttccttaaacacaccaagcaagctccttccttctgcctggaaccatcttctccaggtatccacatggctccttcttttgcttccttctgacctctgctcaaatgtcacctcctcagtgaggcccatcctgattgctcacctagatttccaccccacccaacttcttctgtcccttttttttctccatatcccacctcactaagtgtatatttgtttgcctatttgtttatttcctctccatgtattggaacgtaatttccacaaaagcaaggttcatatctgtttttctttttttaaatttatgtttaatttacatacggtaacattcactttttggagtacagttctgtgagctttgataaatgcacagtcatgcaaccatcaccaaaatcaagacacagaacagttccatcatctccaaaaatatcttcaagcaacttctggatagtgaggcccttttgccaccctgcccgatgtcaatcatggatctggtctctcctctgtagttctgccttttctatttaatatgtgtcatataaaagacacacagcttgcagcctttggggacgggcttctttcttgcagcagaatgcttctgagattcatccatgttgttgcatccatcaatcgtctgtttctttttattgctgactcgtaatttatcctatgaatgagccacttgtcaatccattccccaggcgagggacatttggattgtttctagttcttggtgattgggaataagctgctctaaccctgcatgtactagattttgcatgaacaaaggttttcatttctgtaggttacacaccaggagcgggattgcgggatcatgtaagtgtgtgtttaacgtcacgagaaactgccatgccgtttttcagagtggttgcaccattttacattaccactggtgatggaggagcctgacagctgttctgcattcccacatgttttttctcatcattgaatttccaccaccaaggatagaacctggcactggtaggtgctcaacaaatatgcacatagtaggtacacaaaaatatgcatacctactatgtgcacataaacagataactagaggctatcacacagtgggatcggaaggatgaattagggtaaaatgtatagagtgcttggtacagtgcctggcccttagtacctgaggatcattgctaacagtagaggccactctccccaggggagggccatagggcaggggcctcagctccagccacacagagagactgcctagcagaaccctccactatgctaatcgctgattccttgagctgtaggctttggggatataaagatcttctccctccaggaactgaggaggtaagaatctgcccccacgccagcaagacccgcaatgctgcaaacacttcctgaggctctctgtgcccccctccaccccagcgtagggaacccaggagacctggctccagctgtgttttccttgcctccacactcaaaaatgggaggcccacaggccaaggaatggagtaagtctgttttcctagctgaccttgtcccctcaaggggacaccagtgcccccacgctgctgagttttctcccactttagccaaactctttggctgcccttgtccacccccactgggggcctgtttgccagaatctttcagcaccttttctttttcacaatcactctgaccctttttgctattgttttttgtaggttaattgagtacgttctcctctcggtggagaccgcaggcagggccaagcacaacaggcccagcacgaagggggcctgggaggcccgtcccaactctgcagcctgaggcctgctcaggcaagggcagggggacattgatggggccaagatgtaactgacctcgcctgcaggcagcagctagctggggtggaggacgcgggggacgagagcatcaggcctccctttcaatccctgctcttccttcttcctcttttttgttttcagagcagattatccctaaattctccttcagttggtattttctgagcaccttctaaccgcagaaaactgtagcacgatgcaaagtgtaatgactgacagaaacgaggcttgcagtggtctcacctggggtgagtttgtgccccaggagacactcagcaatgtctggagaccgttttggctgtcggccctaggcaggaggggtcctgctgacatttagtgggtggaggccacggatgctgctaaactttctacaatgcacaagacaagcccacgtaacaaacatcgatccgggtgggatgtcagcagtgctgaggctgagaaaacctggctcctcactgtcccattatatggatgaggagactgaggtcctgtgcagctaagtgacatgtccaaggacacacaggatttcaacccagaggcctgactctgctgtcctcatgcacctcccactcctagagctcatcaagggacggggaaaggagttaggagggacagggacgcagggggagttgacctgggtgtgggaatggagctctgggggccttccgcagaggatgaggggactgaggggaatttggaaagactcccgggggatgggagagtctgtcatgattccctttgacatccgtttctgatacaggaaaagcctgctttgaaatttagggggtgggggggaacacctgtcacccccacacagcacttccggcagatcctgggaggggcattgcagtagcaaatgatgaacagcagagggcgcgagggttcctttgcctcctatgtaccacttttttcatcgtaaagggagtaggtgtgccttaaagaaaactgcggaaagcccaaaaaagcagaacaaagaaacctacattgcccagaatcccacctcctgggacagttgaacatttaaatagtgaatagtttcttcctttttccccagacaactttgttgacattttttattctgttttgttttgctttccaacacaggggccatcagccagtacacatgattttgcagcctggattttcacataacattctatcagaagcttttccctttgtctgacaagcccatgtcatcctcagtccctggtcaccgctgcggagtcagggcttgtgtattaggccgtttttcaatttctgtaaagaaatacctgaggctaggtaatttacagagaagagaggtttcattggctggtggttctgcagattatacaagcatggcacaggcatctgtttctggggaggcctcaggaagcttccaatcatggcggaaggcaaaggaggggcaggtgcatcacatggtgagagagggagcaaaaggggggcgtcccaggctcttaaaccaccagatgtggcatgaactgagggagaagtcgctcatcgccaagggggtggcactaaacttttcctgagggactcacccccaggatttaatcacctcccacagtgcccacctccagcacgggaatcacatttcaacatgagatttggaggggacaaacctccaaaccacatcagcacacatccattcagcagatgtgttttgagcccccatgtgtgggaagctgtgacaagcaaggagatcaactgggtgtgtgctctgtctgggggagatggaccccatccagggtcatttcagatggggcaatgcacagtgatggagtgagagatctgggctgtgtccctgggggggcctctcaaagtaggggacatttggatggggacctggatgaccaccaggaggctgcaggagctgcagggacactcctggcacgctggaagttcacatgagaaaggggaaaggcctattttggataaagatccccccaggacagggtgaggggtggaacatgggacatgaggaacatgagtggtctcagatgcctacaagtctccttcctgggcctttgggcaggtggtggcgccatatacggcagcagagaaggaaggatgacacttaagcctgctgcccctgctccccccttgatatgatttggctctgtgtctccatccaaatctcatctcgaattataatccccatgtgtcaatggagtgaggtgattggatcatggcagcggtttttcccatgctgttctcatgatagtgagtgagttctcacaagatctgatggttctataagtgtttgacagtttctccttcagagtctcgctgtttctcctgccaccatgtaaaacatgcctgcttccccttccgccatgattgtaagtctcctgagacctcctcagctatgcagaactgtgagtcaattaaacctctttctttataaattacccagtctcgggtacttctttatagcaggatgagaacagactaatacacctgcttttcccagagcctagcattcagcatgtgggaggaaggagcactttctgcttctctttcattagtgaggataaagagggacagtaccaaaggaggataaggactcaatttcattctaataaaaatgggaaccccttgcattttatttaaaatatcattgtttgtttgctctttcagattgcaaaaataattactagtcattatagaaacatgtgtaaaaatataaataagtacaaagggaatagtggttccccatgatcccattgtccagggaccctccgcaagcctttcagggtattcctttatcgtaagaccttcatcagtgtctgtgtctgcatttattcatccattcaacggaattttttgagcacccactatgtgccagtcatctttctagatgcaaaggatgtagttgggaataaaaacacaaaaatccccgtcatcatggaggtgacattccagtgagggtgacaaacaaaataatcggtaaacgctgcagtacagtctatgataagggcagaagtgccatggagaaatgaaagcagggaacccggaggagggcactaaatggggtttggattttaagcgggatgctcagggaaggtgtcactgagaggtgacatttgaacagaggcttgaatttttggagggagcgaggcatgagggcagctgcgggggaggggagagagaacagcaggtgcaaaggcccccagggggcgagcctgggtggctcaggaggtgcgagaaggtcaatcggtgagtgctgggtgagcagggatggcgaggggtggggaggataaagaggaagttggggagcagacctcacagggctgtgggggacactgagaggaccacgctttactctgagtgacatgagaagccagagcaagactttgatttctctgtaaatgttttattgtcaatccaaacaaaagtggagagaacagtaagatcaaccccacacactcaccccccagccccgtgtacggtccatctggcttcactgatttcctccccactggatggttttgaaacagatctgggcaccacctcatttcatctgtttacattttgtgaatgtcaccaaaatcaggattttcttccagcgtaacctcaataccattatcctgacttcaaacattaccagtcattccttagtgttaccagaattccagtccacgttcagatgtccctcattctctcaattcattttcgccttcatttgttcaaactaggatctaaacgaggttgtttatgacagctgagctgttccttaggtctttttaaatctatgggttcccccttcttctgtttttctccttgcagtgtgtttgttgaagaaactgggctgctcattctctaacgtttcccatattcgtagcacttatctcctttgaatatgccatataatttattcttcttattaaaaaaaaagtcctctctcccctactagaaagcagtctcccaagagcagcctgttggtctgttttgttccctgctgtgtgcccaacaccagagcctggcacagtcaatgacccataaaaggatggctaacactgaaaatactggctattgtttcccagcgttacagatgaggaaactgaggctcacagaggttaagtgaacttcaaaaggtcatacaaccaggaagtgaggagattgggatttgaactcaatctttcaggcttagtgatcaattttaacaaccatataccacactctcccgcgacccagctccctccttcccgacagatggcggctgtctgtgaaaggacccagctccaaaggcaattccccaggacgctcggggtcccactttcctaggggtgctggtgcctgctggaagctgagccccactggagagatgaggccatgctgagccaccggggacactagtcctccatgagacagtctcagcagccctgtgtgtcaaactccccagcactggcttaaactccagtggctcccgaaggcaaggacccccagccctcgctgagcatttggttcatagtaagtgaccaagaagctcctgggagacaagagacccagcaaaagtggtcaagatatctggactgcactgctgctaggcctgccaggctctgtctcctgccctccgtgtcaggccctgcctccaaccaaccagcctccaggtcagcattgctatgtgattctcagaccagcagcttccgcacacaccagcaccttgctggaaaggcaggttggaacaccccaaggatgtggtacacggaaagacagggaaccataggtgctggggtggaccctgcgatctgggctttcacaagccccagagactctatccgcagagatattctggttctcagtacctttgggcagagccttctttgagtgttgaggccagaagggccaactccttggtttattgattagtagggaccactgggctctttctcaaatgggtctaaccatttatctgggtgcaggaatgtggaatttcagtgctgggaaccatgtgcctgagcctcatgttgaggtcctctggggtcccaaggtctacctggtctagcatgcacttagagagggcccatgggtgccagacacagcaagcagcttatagcgtctgtcctcaagtcactctgagaaagcccagggttaacggctaagccggctgctctctcagcatcctctcttccatcttcctgtttatttcatggcttccatcaccactgaaagttgtcaccaatttgccctcttgttcgtctgtctcaccccccatcaaacatgcccctcacccacccaaccatgagctccatgagaatggggtctcctcactttgttcccagcacccaaaatagtgtttggcccatagcaggcactcaagaaatagatgctcaatgaatgagtgaatgaacgaatgaatgaatgggaacaataagaagaacccatggagagagagaacgggagtgaagggagatggagaggttgcgctctcaaggtgggattttggagtttcagaccatggtgagtggaagtgtcagaacagatccccaggaaataccaggcctccatgcaatattacaggtttttaaatgtagccttaatgtgatttttgcatattgggaataataaaaatgtaagtgatgtctgctcagagcacactccctgattcaatttccactctgttcgtgagtatgttgttaaattgtctggtcccacgggttaacaacaatagattcggagtacgttcaaatcagaaggcacagaaggtgatccagagcagagctttccgatcttttgacagcagctcacaagaagaaatacagttgacatagcgacccagtacctgtgcacaccacgtacacacacacgtgaaagttacaggaaaccataccttcctccgtgcaatgtactctgttattttctgttggttctatttcctttcctttaaaaaatgacagttgccacttttcaacttgacttcataagtcacttaaggggtcacagctcacagtttgaaaatcagcaggtccaaagcctgcaatttacacatggggaaatggagggagacccaagctgggccaatgaccttgctaaggtcacatgggaagttagtagaagagccaggcaaaggagcttctacttccagtggaactttcttccagtgtagacatctggagatctgggaatctaaggatagtagagaaccttggaatgctggaattccagcatcatggacagtgattttgctgtggatggcccctctgttccatcaagtgctcactcctcccccgccaagctgccctctatcctggcacgctgcctgattttcttcataatgtttattgctctccgacaacatctaattagtttgtttccagggtgtctgtcccacccacccgtaccacaaaatgcaatctgcatgagagcaaggacttgtctgcattgtgctctgctgtgtcccgacactcaaaaaggcatctggcacatagtagatgctcaataaatatttgttaaataactacaagaataaatggagcagctggtagctggcatccaggttttgatgaaggcacctctcagaccacatccaaccacaatttattaacaagcagaggaaaacagctccacaagccagtctggaagctcctggactgccagatctcaggcccaactgagactcagaaaatgctttgcttaagaggctccctggggcaaaggccacagtattgcagcagtagaatttgtccagcatccatggtggtcaggacttgggccttttagggatcaaacccagggtgccatcccctagagcaactctggccaatagcactctctatggtaatggaatgttctactctgtgctgtgccatgtggtagtcaccagccacatgtgccaatggagcccttgaaatgccgctagtgtgactgaggagctgaagtatccattgaattttagttaattgaaattgaagtcaagataaccacagtgtgacttgtggctacacatgagacggtgcagccctagattcttaaaccctgcggctcctgcaagggccgggagcagctctgacacattcccccatccacttatcttggaaagcactgctgccactgaaaacgacgcatgtctcacgtccactttgccaagcatcagtcctgacttccgcccgtgaccacttatgtcgaaagttccttgggccagttagtgaagcctctggggttgacctggcataaagctagtggtgccattgaagatgccacctctggagcgtgatctttttgacaatcacctccagagaacgcattcctgattagaaaaactggccgccgccaaagtggacattgcaatgaactaatacatggatgtccccctatctatgcagaagtagcagaaacatgaaataaattaatatgtaattacagttgcaatgggttgcgaaggatgctggcagcgtgaataacaggacagggttgaggtcaaacccaccttccctgagcaagtgatttttaactggagagttgtcctctgcagaggggaaagccaagagcagggaaatgaagggaagcattccaggcacaagtagctgcaggcacagaggtcctggggtgagcttggtatctgaggaacagaacaaagaccaacgtggaaaaccaggaaaaccagcgaggggccagaactttctggctattctgtcacaacaaggatttgggatatttttctcccaccgcattctctcatcctttccctgggatgctggcaggtactgggttaagcaaagctccgtggaagccagagaagccagctgatataaaacctttgtatatgctgtctgctataggatccaatttagtattgatattcccgttttaaaaaataataatttccattagattgagaccagaatgccccgtgaagcccagtgtggtttgccaattgattcacagaatgaaatcttatctaaaatctttttattttatgctattagggacgcaggagggagcagccaaggaaaaaaatctccctgcttggttaatgcacagggtcagctggaagtggccctagggccgtcttaaaaagactgtcatttgcgatttcccactcttttgtttcacattaccagtaattgacattttttttcttcccttcaagtggagttaatggattgacatcttcttgttagcaccttggatctttattgaggactccttcctggggctggcatcacccccaagtgcccttgggaggcctggggtggtccgtgtggtttgcccacatttctcttggcggcccttggcagcaggcggtgggagggaggttgagggaaggagggggtgtgtcccccacccccaagtccacaggccacacggctctgaacctttggaatggcatctctcacgctgaacatacgatgacccaggaaagggcagccttgaagggttgcctgcaggaggccagccttgtgcagatgcgaaactgggcaaagagaggaaaactgtcagcttcgcgtaggcgagaaaaaaagatgatttttccctttcaccccccattttattttcctgtaaagataataaaaagctttgacttccattatacaagtgacagactctcactagagaaagcacagccggccactgcccctggctctgctccagccacaacggcccctagctgttttctgtgcacccttcatttgctgttccccttgcctgaaaccttcttcccccaaacattctcactctctcctctcctcccaatctttgctcgagcatctttttctcagtaaggccttccccacccacacctgcacctgcaacctggcacttcctgtctcctgcctggcttgattttgttctcctaagcacacatcaaccccagcctgatgtatatttcacttagttagatgttcatcatctgtctccacctgccaattcgttttgcattttataattcactgttttatcttcagtgaataaaatagcatctggaacatagtagatgctcaataaaaaattcaatgactagaagaagagggcagaaaaaaaatcactcccacttcttcatattcagcctttggtagtatttggtgcatttgcttcttatctttttctatatataggcttccgtttttatttctacagtggagttccccatacactgggttaggctataaagataaatgcctatggagaaagctgcaaaaatgcccatgaaaacctcttatattgctcttgaatggttttgtctgtacatagagtagttggtttgcatttgggaggtatgtagcatggaaattacatgtctcgaaacaccagagttgtttggcagaaagagatgctctcaggagaggtaggactccgtgaaggcctccagattcacaccacccacttcacactcaacaagtgacaaatagtcattaaactagaggaactgcctgcactgtttaagtgattttttttctctcttgtttctttttaaaaacgaatatagctgaatttatacatgtgtaatgtgcacagaggcaactttcctatacgcagctccaatcatacctgtgaaaataattttaatcctgcataattatattgtactcattttctacatcactctaaacacttcataaatatctctaacagctgcattatctgccatcagggcatcctttcatctactcagcccatcccctattctcctacattgaggttgtttccaatttttcacaataataaataacacagaagaaacatcatgcccaatactctactggatttcagattccttatttgggtcaaaatcagggagatttatgcaagtgggagcccagggaatcagtgtcagattagcaaagtgagtaattgctaggaagatagttttgtcttgaaagtgaggtcagagtgcagctgggtgggctggcgtgcacctgccctctagtttaggccagcattccagggagaaaggactccagagcacactggaagagaagcaacctgaccactagggggagccaagtgggagtctgggttaaagagagatggtattaaccaagatataaattggagcagataaggaggataattaggaacagcattaaaaataatagcatcaacatacatcatcaacatatgctattattttacaaccctcggcccaaggttatggctccgtgtctgtaaagtaccaggcattgtaccagtactatatgaccctcatctctaagcctttagcaaccttacaagggacaaatcactatccttccctattcttgttgcagaagtggaaattgaggctcagagaggctaactgattcacctagcatcacacgcagagccaacattctaactcaggatatcagacatcaagcctcatttctatttctatatcctttaaaaatcaaaatgcaggtcaaaaagatccaaggctatggccaggaagacacagcattgtctagaggacaagaacgtgatggttagatgagagtaaatgatatgaaatgctgagaggtgacacggacatggaggcctccattcatttggccaagagtggtagacttgatggcgtggtcactgccaggtgtgaccatggcatggggtcttgtgccaatgccttccttccacctcctcacttttccccaccctgctttctgcccaagaggctcacctgcatgggctccaccaacaggctcccatgggtgggtgtgctctggttgcgtttggccgatagtgacctttagcaggatgggaggagatacgatgcaaagtagaaatttattccctgtccctggcctgcagagctacctgtgatggctgcctccctcagcccaagtcatggctctgtgaggtggccccctccacgtggctgtcattccaggagcacctctgtgtcagaggcaccgtccccatggctttcctccaccctgcccatactttgtaaatagaaaatcccttccagtgactctgtttagctgtgtccccatatcttcctcagatcctggctgatagagacccccattcatgcacatttactctgtcctcagttttctaaggtgagactgcaaaccggtggccctgttggttgaattaggccatcacacatgcctcgtggtctgtgcagtgcttaaaaatcctttcaaattagtttgcaacctttaaccattgggagagttaatgcaaaaaattctaaaattttggctttgctggaaaacaaagcaaaacaaacaaacaaaaaatggtgggggctccctggccacacggggcttgccttcttctctcaggatcacttttaaccacttgggaagagctttgcagccttcgaggccttttcaggtaccccctcccatcgactcctcttcctcattgacgttacctgcccagccctggtaaacatggagtttatgacagcctctcaagccttccagatgtggcctcaccagcctttatggggctgcttgtgagagaaaccagaactaggagtgggttctcgggcgggggcacagctcagagggcagtcagtaccgaggaaatggagatgcggagatggccatgagcttggcggctgcactgagctggggcagcaaggtcgccgttatatagatcagcctggggagagagagactgtgctttgatcgtgggcaaggttagttagatttgggaatagcagcctctgtaattagcccctggtaaagagctgagaggcaatatgagagcgtgtccaagagtccatctctgcgatattgagttcagatggaaccaaggaattagaaggctctggataaaatgaccacctctgccctcctctctgggctttcctctagagctctgggggcaggtaagcgtgagagcatgcccttgaccttctaatgagatgatgctgcaaatttcctcccaattggcttatcaagtttaccagctcccactcacccagtgcaagctttggcccagagagagctcccttcattgtcaacatgccaagaaagcattctgaatggttcccaacacacacgcaaatcccagcacaagagagacgtggagggcacatggaggaagacagtttgaggtcctaggatctgtggtcagactgggagctgcactgcaggacaggcctccaaagttggtcacagagcccctgagttggtatccatgatcttctctcttggaaaacttagagagagttcagttttgcaagcacctgaaggatgcttcagccttggagtctgcaatacagtagggtggtcactgtcatcaacatcagctgtgggagcctgacagacttcaaactcatcctcgttccttaaagccagtgcctttagcaatgtcattaacctgtgtgggctatttcactatctgtaaagcggacggtggtcacagccactaagtccttgctgctcagagtgtggcctagggccaggagcatcagcatcccctgagaacttgtagaaccacagaatctcgaacccagccccagcctcactgattcagaatctgttttcacaggctctccaggtggttttgatcaaactcgtagggcttttgggaggagtatatgcagttcaataatgcaacagttttgtttgtttgtttgtttgtttgttttagatagggtctggctctgtcacccaggctggagttcagtggcgtgatctcactacaacctccacctcccggactaaagggatcttctcacctcagcctcctgagtagctgggactacaggtgtgtgcaccaccatgcctggctaatttttgtattttttgtagagatggggtttcaccatgttgcccagactggtcttgaactcctgagctcaagcaattcgctgccttggcctcccaatgttgggattatagctgtgagccaccatgcccagccaatccaacacatatttcttgagcacttactatgtgccaggcttggttgcaaatgctgggagtacagcactgaacatggcagatgaatcccagccctcaaggaatttactttctaatggggtgtattagtccatcctcatgctgctaataaagacatacccaagactgggtaatttataaaggaaagaggtttaatggactcacagttccacatgactagggaggcctcacaatcatggcggaagatgaaggaaaagcaaaaggactttttacatggtggtgggcaagagagcatgtgcagggaacgccccttggtaaaaccatcacatctcacgagacttaattactatcacaagaacagcacaggaaagacccgcccccatgattcaatcacctcccactgggtccctcccacaacacataggaattgtgggagctacagttcaagatgagccaaaccatatcatagggagagacagacaaacaagagacagacaaacggacaagatgaaaatataaaatacaggaaatgggggatggtgctcagtgggaaggagaaaaataaagcagtgcttccaggtgggacccggcagggagaaggactataatggcaagtagaatgacaagaaggtgacatttgaacagtcacctgaggaaggtgaggaaaagtatattccaggtgaccagaacagcacagacgaagtccctgcagcagaagtatgcctgctgtgttggaaagatctgtcaggatgtcagtgtggctggaataaagtgagtcagcagaagtgctggaaggtgaggtcagggagaagtaagagcaagggcggatgatgcacagctttagaagctgctgagggtcctggcttgtcctccagttcctgatgcccaggaatgggcagggacccactggagaggggctggaagcagtggctggcacgtggtaagttcagggaccagcattattgtaatcgttgctgttatccaaagctgatagaaacaggttggactcacccttgaggtttcagcttaggtgtcccttctccaggattgctgacaccccaggctggagggggtgcagacctgagagcacctcagccttctgaaagctcctgggtgaggctgggatggggagctggccagccctattcacgatcgtatctcagagcacaacactgtacttggcatctagtagttgctcaataaatacctgtcaattagaggaatgaatacatacaaagacttgggggtgtcgggtgggggacgtgctcaggaaaggtggggaagtggctgggaggagtgacaggagtattgttagaagtaaacacctgagctttgtccattcaaggtgccctctggagcctgacgcccaggaacgaacagggtcagggtgttggtcatctctgatcacactgctgggtaaggtaacccagaggccaccaggactctgtgccaagaaaccctgggcctttgtgctgaacttggcaggcttcttgtcctcctctggctcatttcagggccaccccatgctttagcccaggctccaccatgaaactttctcccccacggaaatgcttgggcactgctggtaaaaggatggcccctcaggagagccaccaggcagcactcagagaaagtgacaatgcacaggctctcaacaggcagcccaccctctggggcagggcccagagcagcagttctcaaccttggtgatcttgcacccctagggacacatggcaatgcttggggacatttttgtttgtcacagctgggaaggaggtgctactggcatccagtgggtggaagctcagggtgctgctaaacattgtccaatgcacgggacagctccacagtgagaattatccggtccacagcgtcaacagtcattatcccttaaggagccttttaagattttttttttctaattccccctttaatgaaattttagaactatagagatattgcatacatatctgtttgtgtgctgtaggtatatgtgtgctttatacataaaaaaggtaagatttggctgggtatggcagctcacgcctgtaatcccagcactttgggaggccgaggagagtggatcacctgaggtcaggagttcaagaccagcctgaccaatatggtgaaacgctgtctctactaaaaatacaaaaattagctgggtgtgatggtgtgcacctgtaattccagctactcgggaggctgagacaggagaattgtttgaacccaggaagtggaggttgcactgagctgggattgcagcactgcactccagcctgggctacagagagactgtctcaaaaaaaaaaaagtaagatttttaagtgtccattgatggatatgaatagtatgaatagataaacagaatgtgctattgtacatagtgtggaatattattcagccttaagaaggaaggaaattgtggcacatgctacaacatggatgcatcccgaggacactatactaagtgaaattagccagtccccaaaagacaaatattgtgtgattctacagtatttgtagaatattgtatgatgtacctagcgtagtcagaattctagagatagaaagtagagtggtggttgccagcgtctgggagggcggggaatgtggagttagtgtttgatgggtagaaaagacttctgtggatggacagtggtgacagttgcacaagaatgtgaatgtactcaatgccactgagctgcacattttaaaatggctaaaatggtcaattttattttatgtgtattctgccacaattttaaacaaagagtattccgacgcgttaagaatcagttctcgcccgccagggggctgtatcacccccattgagaattcacagcctagagatccttgcataggacctacaggtgtggatgttcatcgcaacatggttgggggtggtgagagctgcaggcaccctgggagtccctccctttgatggtgggagaagttcttaggaagaatgggcccacctggacaccgcaggtggaaaagctggcggagagatgctcttgctcattgctcagaggcatcgtgaccgccccacactcatactctgcaggtttttggaaaatccaggctgggcgcgatggttcacacctgtaaccccagcactttagggggctgaggcaggaggatcgcttgaggccaagagtttgagaccagcctggacaatacggtgataccccatctctacaaaaaagagaattaaacagacatggtagcatgcacctgtagccccagctactcagaaggctgaggtgggaggatcactcgagcccagatgttccaggctgcagtgagaacccctgcattccagcctgggggctggagcgttatagtaggtagctggtcaggtatgagcagggcaggagaggatcctcctcaacacacaccaggagtgtcacgcaaccatcaggtgacggtcaggcagttgttaactggctttctaaagtaataattggccacagctggcatgagggaaaggcagtcccttaatagatagaaaacacctgaaatgggtggccagaggcttcccaataagatctcaggagtggtgagaaggaacgcaggacccctgaggcttgccaccatatcaaaccccaagtcaagaggtcaggtcgcacacttggtctctcgagttgcccgcttggccctcttccaagtgcacttccctttctttcattcctgctctgaggctttttaataaactttcactcctgctctaaaacttgcctcagccgctccttctgccttctgcgcctcggtcgaattctgtcttctgaggaggcaagaactgaggttgctgcagacccgtacagataactactactgctaacaagagtgagaccccatctcaaaacacaaaaacaaacccatacacggccaaattagcttcctcatctcctctagtcaacaactcaaactgaatttttcaaactgacctctttgctctcaaaattctgtttttgcctttgttgcttgaaacaatctaggaacatgagtcttcttcatgtcagagctaaacagcatgcagataactagctaaatgtttcagagtcattctttgaccataagtaaaatgtgccaggtgtgcactaagcatcttatgggatggttacaagcagtgccccagatgtgtgcacagcagtacagagaggtcttgacaacacagctcaatgccattttacataaggtaaaatagatgcacacaaagcaattataggtattttgcaaactgcctacaaacaaaaggataactcaagcgtgccagggggaagcaggtgaatggggaatggagattagaggaactaaatagatttataaacacgagcacagctgtgggttgctcccaagatgaaaaacaaaacaaacacacacacataaacaaaagagggagtctatcacataatgtggcacacttaaaacacacacacatacaaaaatgctcgcatatgttatcccgaatcatacaaaataaaagaaaaagaaaacacatctgggcagctgacagtggcaggagttggaagcaaaggatggaataaaatagaattaacacatgaatgaacaaatcaaccaagggttagagcttgtctgaaccaattatgacaatatgtcattgaaaggattttttttttttttttgagacaggatctcactctgttgcccaggctagagtacagtggcatgatcatagttcactgcagcctccacctccggggctcaagcaatcctcccacctcagcctcccgagtacctggaattacaggagtgtgtcaccatacctgcctaattgtttaattttttgtggagatgaggtctcactatgttgacccggctggtctcaaactcctgggctcaaatgatcctcctgtctcaacctcccaaagtgctgggattacaggtgtgagtcaccacccccggccgacagaggaatttgactaaccctaccttcattccccaaggtccataaagtgcccaaatagccatataaagcaccattgcagattcacctgcgttagttaagacctgttagttacaaccaactgatacccaccacattgcctgaaacccctacagggccactttcttataaagaaggcgtggggtgtcctggagccctgaggctgcgaggccagttggctttatgccagcttgactcagagggcacctatctctgtggcttctctcagtcttcctctctgggtctctgctctcttccctccatcttcggacccactttctctgcttttactcacagaataatagccatcctttcttgtgctatttatttgcaaataaatgctaccatttatttgccagaataagttaaagctttattcgttggcttggagacatttctatgagatatttttgaataagaaaaaagaatagaatgtagaaaagagtgtaaaatagaatcccatttttataaaacaaagactgatggaaaaatcccaattaattcgcgtatatttgtgagtctatacatatgtatcacataaaaacacagatgcaaatataagcacaaataaaaatagtttgaaagaacacatgctgggttgttaacctgggtctctagcactgggccacagggataatgtagataaaagagtgaggaaataggaataagggaataaggaatgcacatcattacatgtattccttcatgtaaaattatgtataaagagattatgcaaaagattgagagagagagagagaaacataaaagtgaagtgagaccaagattcaaatctttacgtcacattccacattcccagggaaggactctgattggtccactttggaccaatcaactgtgaccaggaagcatagtcattggatataagtattaatatatctgttcccacttcatctgtgcagctaggggaggaggagaaaagtccagaaacctggggggtgggggaattagtcacatgaagtaacagtttccactagtttttgcttttttctctgcattcctggaaaccttaaaaagaaggattggagaaggaagggggcataaaacaagtaagatctcagggaagcttagaaactaagccagtgaatgaggtggggacagtacacacaaaggttctgtgacaaggccgagcctggaaccatcaggggtctttaagtaattccaggtggctggagaaatactgagagatgggaggagaaaatactgagagatgggatggaaacagaatcaagccaaccatgaaggaccctgggcatccctggtgagtgacgggttcaacaagtttatgggcaggtcaagatggtcttacaagccatcagaaagactccgcttttcctggaatgagatggaagccactggagggttttttgtttgtttgtttgtttgttttcagatatagggtctcactgtgttgcccaggctggagtgcaatggggcaatcatagctcactgcagccttgaactcctgggttcaagccatcctccccactcagcctcctgagtagtactacaggcatgcactaccacacccagctaatttttttttttattgttttctttagagacagggtctcacaatgtttcccaggctggtcttgaactcctgggctccagtgatcctcccacctcagcctcccagagtcctgggattacaggcatgagccgccgtgcccagccaggttttgagcagaggcaggacatagttccacttaggttctaacaggattctctagctgctgtacagagaagaggctccccaggcaaggacagaaccaggagaccaatgagaaggtgaccgcagtagttcaggtgagagacggtggtggcagtggacaccagattcgggatgctttttaagattagagcccacaggatttgttgatggaccatttgtagggtgggacaggaaaagaggcccaggaaggaggtaccattgacatttgatcccaaaactcagccagaccagattgaaaaacagattgaagttggtcactcgcttatctcgaggagtttccaagatgagagtttcagcctgtcaccccagaaatacagtgaggccattagttccccatcttaatcagatctctcccatcctattaagcaatttggggccatatctggagaagattttgttatttacctaaatctctggctgcttcatttagacctggtgtttaggcggaatgcaattaacacattccaaacctggtttcccctaaaatccaatcaactgtaactcgttttcaaatcacactgctttctctaattgtgaacctcagcctccgcagaatagcgatttaagtcaattattgcctcgcttgtatgaaaattgtgctatttatgttggcagctccccacattactgatgagcttcctcgagctaatggaataatgaaaacacaaaacagatttaccattcttaataagagaaagagataatgaaggcaaattaaaatggaggctcagatctgcatggagaacaggtaatgcagtttcttctttgaaattaacactcgaattctcaaatgccaatggcagggagggggaaagaaactcaaaattcctttagacacaagtgtgccacttcagcttggttttgaagattgtggtcctccccggcactttctggagtttagatatgggacgctgtcagcagccatccctgctggcacaatagcccacgcgctcacctcctcccccatttatgagcgaaaactcgctttccaccagacacgacgttcagctctctcatgccttaggtcattagatcctctccaagttctatgcgctcagtagcgttatcattatttcacagaagaaccagttaaataatttatccaaggcttaacgctgcatgtgaatctagcccagggtctcaactgattgttgtttgaggctagctaattctttgtagtcgggggtgggggctgtcctgtgctttacaggatcattagcaacattcccagattctactcacaagacaccagtggcagccccatacctccagtgatgatgaccaaagatgtcttgagacgttgtcaaatgttctctccgaggcataatcacccccggctgagagctgctggtctagattgtgtgcttgtcaatcaacccgaacagccagtcttgccggtgtaagcagcaagaggctgaaggtcaggaaacccgcatcctggatctgtccccacctcacattgtggcccagggaaagtcacagttcctcatggggcctgggtgttctgacctgccaaatgagtgtgatggcactgggacctggaacctggcttggctaaagaagtttggccaaggtcattgaagaccttggtcaagtgagaagcagcaggccaaggtggggcggtcacaggggggaaaggtcagagagatgtgaagggcagccaagccagagggtctatattggcaagaagcaaggtcagctgcggtcagaggggccagagacctgcaaaggccagagctgactccaggaggccgggagagctgaacatctgcctccctccctcttcctgcaaaggccagagctgactccaggaggccaggagagctgaacatccagctccctccctcttcctcctctgcaccaggcattggggtcttacacctcattttcctgtgcttttgctgtgcactttcccatttactacaaatagatgcttctgggcctaattctggggctaatgagactcagactggtgattataataaatataaaaatgatagaaacagatacgaaatgctgtgcagagccctccactggcttcacggcctgcatcctcccagcagcactgtatccttatcgttattagcccagagggacagcccattgctaggtgtcacagagagaaaggagagaaaagagagcctttgaggccgaggagaaagaaagaaagaaagaaagaaagaaagaaagaaagaaagaaagaaagaaagaaagaaagaaagaaggagaaacttggtggtaatggttgtcatttattgaatgcatactgtgtgccaggccctgttctaagcacctgacttggttttgctcatttaatcctcaccatcacgtttaatctccacttcatagttaggcacagagaggttaagccagttgccaggtttgcacagttaactagtggtagagctgtgatttgaacccatagtctggctccagattctgtgctcttgacagctgtccctcagagctgatggctctgtgctgcacctgggaaatttagtcctcagccatgggggcccctgaacccacccaaggttttgtgctttaaacacagcatgaatgattggggcctcctgtcctggagggaacatgtgggaactagacaacccattatgtagggactttgcactgataacagtgcccccgcccaccactcccatggcttgggctacccaggatattcgcacaagcattggttgggaaccccaagaaggactgagtttggcctccccagcagttcactgacttgacacatggcttggagaccaaaagaaagtgcttaataaaaacaaaacaaaacaaaaaacacctgagtttgtgaaccaagaataatccaaggacgatacttggtcagtaagaaaagtgcccagcatggaggttggcacatcgtgggtgctcagtaaatgttagtccccaccttgttcctgaccatgccatcaccacccaccccccgccttgcttagggcttaccccgctgggtgggggtctgtttggggtagcttgtgcagtcatctaactggtcccatccctcacttgcaacagaccgcccctgcttggtagctcatctttcttttctgaggctaatgcttggctgtgtgacctttggcagggtgcttgacctctctgagcttccacttcctgggaggttgggcagaatctgtggattctctttcaactctgaaatgctaggaatctccactcggctctctcttgcaaccctcttctctcctcttccctccacctcctccatctgtatctgtatctctttccttctgtctataccaagcttctccaacctgtggtctaggacagctttgaatgtggcccatcacaaattcgtaaactttcttaaaacattatgagatttatatttgcaattttttaaaagctcatcagatatcattagtgttagtgtgttttatgtgtggctcaaggcaattcttcttcttccaatgtggcccagggaagccaaaagattgaacacccctggattctggactcttctccacacacctctgggcactgctctgagcctctttctagatcatgatttcccaggaatgggggagggcaggatggagaggaccattcccccttttccatggggtggcactgcccaagagggcttcgggctagatacccgggcgcgcggcttgcgttttcaggaagcttgtagcacaggtagatctcagctgacgtctagttgacaagctaaatatttacggagctcctaagatttcccaccacgttaagcccattgcttgatctcacgtctgcacacagcccttctctattcaccttcagtcagacgtttcccagaatcctctgggttccaggcaccatctctcaggagggtgatgaaaccatgtctgcgtctaatcaattccagtaataataataattccttatcgttgtataggatttctcaaagcacgtttgcacacattatctcactcgcttttcacattaaccctgtgacttagattttattttgagtcccattttggagagcatggctgagccacctactccagggccagcgtgtggcagagctgtcaggatcctccctcttgtcctcccacggttggcaaggccagctcactcacatccagttcatctctgggccccaggacaagagtataaatggagcccgacgtaccatgtgtctaatatttaaaagttataaacaaagctaaacatgtttttttatcttcctaccttgactaaaatacctggaagcccaggttcaaatttagagatcttgggccgggtgtggtggctcacgcctgtaatcccagcactttgggaggctgaggcaggtggattacctgaggtcaggagttcgagagcagcctggccaacatggtgaaaccccatctctactaaaaatacaaaaattagccaagcgtggtggcgcgcacctgtaatcccagcacttgagaggctgaggcaggagaatcatttgaacctgggaggcagaggtcagagtgagttaagatcaagccactgcactccagccctggtggcaaagcaagactttgtctaagaaaaaataataataaataaataaatttagagatcttgggctccttggggtttcccactggaatgtgctagaagccataataaaaagcatggcctttttagtttcataaactaaaaaatttgctttatgccacagccagtttaagttcctgtcatttataggaagagtcctgataatgcggttgctgtggaagacagaccaggggacaggagggaagggaggccaggcttcccctggtgaactgggaagatcagagacccacagtagttcatgatgagacctttgagaccaacggtccccagcctttttggcatgaaggactggtttggtggaacacagtttttccacagatgggggcagggaatggtttcaggatgattcaagcgcattacctttacggttcactttatttctattattattagattgtaatatataatgaaataattatacaactcaccataatgtagaatcagtgggagcccgagcttgttttcctgcaactagatggtcccatctgggggtgatgggagacagtaacagatcatcagacattaaattctcataaggagtgcacaacctagatctccatcatgcgcagttcacgatagggttcgaactcctatgaggatctaatgccgcagctgacttgtcaggaggcggagctcaggtggtaatacgactggtaccaggctctgacccaggcactggggacccctgttttagataatggaatagctatataaagtttaatcaaagaagaggaccaagaaaacttataaatccttgcaccacatgcacccacaccatgcctttgtaagataagaaaataatacaggaatactgtcaataccttgaaattctcaaaccatagctcaccttcatagaatatcaaagctcatttggcccagtctctctatcttaccaatgaaaaaaatggaagttcagagaagggacccgctcaaggcctccaagctggtgagcagcaggaaccattcatcaggttagcaaatatttcttgatcccatatcacatccaagatctcatggtaaacactggagagaccttgggatccaccacctgtctttgcaaataaattttattgaaacacagccctgtctatttgtttatgtattgtccagggctgcttttgcattacagtggcagtgttgaatagttgcaggagcctaactcttaccttggcctgcaaagcctaaaatgtttaccctctggctctttgcaaaaagtttgctggccaggcacggtggctcatgcctgtaatcccggcagtttgggaggatgaggcgggtggatcacctgaggtcaggagttcgagaccagcctggccaacaagatgaaaccctgtctctactaaaaatacaaaaaattagccagatgtggtggcaggcgcctgtaatcccagctactcgggaggctgaggcaggagaattgcttgaacccgggaggcggaggttgcagtgagctgagatcgcaccactgcactccagcctgggcaacaagagtgaaattctgtctcaaaaaaaaaaagttttcaacccctgcaacaggaaataaactaggcatgaggttccaatctagagagatggaaatagtacccaaatatcattccacaaacataggcaggcaggaaacgaacctctctgtatttctccagggcaatttgagtctccatttttggggaatgttgaaatcttagtttcatcgagttgaggctcctgcactttccatgggtgaattctgagttcatgcagtgccaagtatttgaaggaagtgggtgggggctggccttggggtgacttggccatctgtcatgctttggtcctcagtcactgtccacacagtagctgtggggttcccatcctcagggcacctgcagatccagagattctctgctggatccttgttgccctcggctcacagatattaatcatattcaactgctcccttccaagctgtggggtgaggactttggtgagggccagactgcttggagcacacacctgtgcctacagccacctgtcttctggtcttctgctacctcttcacggctctccccatgctctggacacagtgctgtgctccggatgtctccaggcacactcacacctctgtctgcttttcatcacccgccactaccaccaccccactccaagccatcgttgtcccctctctgggccatgacagtggcctcctgcctggtctttctaatcacaacctgctctccatggttcccaaggtctattagccctgggcagccataataatcctttaaaaatggaagtcatctctgccactcctctgctctttaacccctcacccctctacagtcagcatcccatctgcaatcagcatcaatggcttcccatctccaatcagcatcaatcctaaggtctttgccatgacttctagggctccaaataaaccaaagcgcttttgtccattgaccctactgagccatcctcgttccatccaccccaccccagttaccagtcagacaacatttcctaacacagtaagtgttggctactgtttcaatttttttttttaccctgtctcccaggctggagtggaggaaccctctgcctcccaagttcaagcaattcttctgcctcagtctcccaagtagctgggactacaggtgcacaccaccattccccgctaatttttgtattttttagtagagttggggtttcaccatgttggccagactggtcttgaactcctgacctcaagtgatccggctgcctcagcctcccaaagtgtgagattacaggcatgagccactgtgcctggcctgttatgaatattattactattaaaaaatcagggaaattacatttttctatatgtggagtacgaactgaggttttgacctgtttacatgtctcatgagagggaccttgggttctgactgtctacaaggtgatataccctgtctagaagcttcccctgcccccccgggagacccaaggacccctgggtcacaggatcaggctttctggctggtcgtcccctcagaagaggccagggctgcaatcttgtcttaagaatctttattggaaaataaacaccgttaatgtacaagaaatcccatccaagggtccagtcaaaacatctctgtgtggactgatgccatcctaatgggctccagatgtcctcccgtctcagtgtcctggtgacctgagggagggaggtgggccttgggggagacacgtggcaggtttggaacctgagcagggcctctttgctgccccagtttctctctgtgtgggaaggtttgggggacctcctgcacccgaccctgtcccgtttcaccagacccccgtctgtctttgccctcagcggcctctgcagcttccttctcctgagtttattcatctgaccacaggaaatgcccagcttgggtggatccgatttcacttgaaattgaaactggaggtgactccttccggtcagctgagctggaggccatgtctatgccaaagcaagccagctcttcccagagaactgtggaaggagctgcggtggggatcgggtattaggagggagggggcttggagagatgcgtcagaggccagaaaggaagacacaagttgggggttcgaaagacaagctcagaaatgtctctactgataactttcttgaagattactcttcaaaattacggccttacgatttaacacctgagctgaccccagctctctctgagacctcatttcctaccacacctcccagcaccctctttgctgcaaccccactggcctgctcgctcttcctccaaccaggcaagaacagtcctgcccccgggtctctgcagttgctggttccatcacctggagagccctttccttaaatatctccgcggctggctcactctgttcagatgtccctcctcagagatgctctccctgatggccaggtctagaatatctgctgcctcccctctgcctcgcgcttctgtgtcttttctcttgtctcgttttccttcacggcacttctcactacctgctactagacgacgtatttcatcgtctgttgatttgcttttcctgtctccctcgctaggctccaggagccaccgggggcttgttcacgcttgctgctgtggctccagcagtaagaacggggcctggcacctagtaggtgctcagtcaatagttactaagtgatgctatagtgatacattctcagcgtaaaaatatttaaacgatccaggtgatgaggtcaggagttcgagatcagcctggccaacatggtga[137 bp omitted]actgcactccagcctgggcaagagagagcgactccatctcaaaaaataaataaataaacaaacaaataaacaaacagtccaggtgagctttttaaaaaataatccagcagatgggtccttgaggcttcacccccacctcaactgcccccaaccccactccaccctaccctcagtgtccctggagtctggagcaggcggctgggcccctgtggtggtataactgcctgctctgctccacgaggctacagagggcttcatgtggatgtctgtttcccttcctcacacccacgtggctgtgactgcaaaggaatggcgactggacagcgtcttgcagcaaccaaggcaatcacagtaatcctggccgatagccctagagccctatctgagcctcacaacaaccccagatggaggttacatcattaccccatcaacagagaaggaaactgaggcacagagcgattcaatgtctgcccagggtcccatggatagcaaatgggggagctgagagctgaagcccagtattcccagttgggtattggtcccaggtccacatgaggccaaacccaatgtccttccctttacacgaagcatcatcagtgtgctctggagccaagagaaattaagcacttgcattcgatcctccagcatggctctgccagggaaagtggccgggagaggacacttacctctggggaaaggagaggaactgaggctcacagactaatgaatgtgtaagagtcttaggtctctgccaacctcagtggtcagagtccacactacttccccttaccagattactgccctctgttagagtcattcttcggggggagctgccaggaggcctgtgtattctcaccaggcttccctccctgagagaagccaaacgtataaacaactcatgatttgtgtgaatttcccatgatgtacccaatccaagtttggctataccaaatagatgaaagcagagacttctagaaatccaaccctgaggtcaggcgtggtggttcatgcctgtaattcccgaggtgggcagatcacttgaggtcaggagttcgggaccagcctggccaacatggtgaaacccgtctctactaaaaacacaaaaattagctgggcatggtggcaggtgcctgtaatccgagctactggggaggctgtggcaggagaatcacttaaacccaggaggcggaggttgcagtgagccgagatcgcactgcactccagcctgggtgacagagcaagactccatctcaaaaaaataaataaataaaataaatcgagccctgaaaggcacttggaaaccatttacccactctccccttctctccttccattccactctcactgctgttcccatcacaccaggtacagacgtaccctccctccgggcctgtgtgcttgcccagccacccacccagaacgtgactgcccccctcctgccctggctcacatatcaccttctcagtaaggcctttcttcacctgtcatgtcctgacataccaggtgctgcacttatttttgcatttaatatttgcttccaccttctgggaggtcaccttcacaggggcagggatttctctttcctcgacttcctgcagtgtgtcaaatgccaggcgccaggagatgcccaacacattagttaaaaaattgatatccaagagcctctccttttacaggtgagcaaattaaggaccagcggagggaaggacttgcccacgtccatccaaccaactagagcctatagtcattgcttagggccgtcatgacaaattgccacaatcttggtgccataaattcctgccaaaacaatagaaatttctcctctcacagttctgaaggtcagaaatcccagatcaaggtatgggcagggccacactcccctgcaaggctctgggggagaattcattgcttgcctcttccaacggcaggagatccctggcttgtggctgcacctctgtctgcctccatctttacggggccttctctgtgtctctgcgtccctctccctcctcttataaagacatcagtcattggatttaggacccatcctatcttcagggtgacttcatttcaagatccttagataattatgcctgcaaagatcctatttccaaataagctcacattctgaattttgggggacagtaggcaccctcctacagaggcagagctggcaagattccaggtctcctcccaactgcagcccccatggggacttcacaaggaactcagctttcagggagggcgttggcggccagcggctgtggctgtcagtctcccacgtacttgtcaagaaggagatgaaaaaaataaactatagggttaatgaaagcggcaagatgacctcggctgatccccgtaatcccttgctctaagcctggctttctatcatcagtcaagggttcttttttttctccttcttcagaaagtttctccagagaagcagcccttccaaatttaataaatctccccgcccccagctttccctgaaataatgaaccggcaggatgattttcaaatgtctgtctcaacgctgtgacgaagaatccccaggaaaaaactgcaggggagagggaggtgtgcagactggggctgtttgtggctgaggatgtgcacagatgcctggaagtgtgtgtgatggtgtgtgcagcgtgtgtgtgtatgtgtgtgtgtaaggagcatcaggcctgtgggacggggatctgacagggactgcctacattgaaagtgtgtgcacgtaggtagacacatgtgtgtgaacatgtgagtgaaaaaatgagcacgtgcgaatgtgcacgtgtgtgtttgcgactgtgcgtgtgtgtgtgcatgtgtgcgtgagtacatgtcagagagaacgtaagtattagagtttatgtgtcaggcaaaggtttggaggtccatgtgcagtgtgaggaaatgcctggatgcctggatatggaggtgtgtgtttattggatgtgagcgtgtgggtgtgcaggtgtgtgtttattggctgtgagcgtgtgggtgtgcaggtgtgtgtttattggatgtgagtgtgtgggtgtgcaggtgtgtgtttattggatgtgggcgtctgggtgtgcaggtgtgtgtttattggatgtgggtgtgtgggtgtgcacgtgtgtgtttattggatgtgtgtgggtgggtgtgcaggtgtgtttattggctgtgagcgtgtgggtgtgcaggtgtgtgtttattggctgtgagcgtgtgggtgtgcaggtgtgtgtttattggatgtgagtgtgtgggtgtgtgggtgtgtgtttattggctgtgagcgtgtgggtgtgcaggtgtgtgtttattggatgtgagtgtgtgggtgtgcaggtgtgtgtttattggatgtgggtgtggcgggtgtgcaggtgtgtgtttattggatgtgggtgtgtgggtgtgtaggtgtgtgtttattggatgtgagcgtgtgggtgtgcaggtgtgtgtttattggatgtgggtgtggtgggtgtgcaggtgtgtgtttattggatgtgggcgtgtgggtgtgtaggtgtgtgtttattggatgtgagcgtgtgggtgtgcaggtgtgtgtttatgtgcatacaggccaatgtgggtgtgaatgtgtgtatatgggcctgtgggagttagggtatgtgagtgtttggtgacggggaggtaactctgaacatcacattaatatgactcataacaatacccaaagcctttccagtggtccagggtccctacacagtctgtggctgccccacttcccttctgaccttatggtaccgccttcgccttcgtcctctctcctccagccgcacgggctccgtggtgctccctgaacacagcaggttcatccctgatgagagtctctcatggcttcctctctcaccttttcctggctctgctctgtgtcatcttaccagagcgccctgctgcagccactgctgccctcctccggaattccccatcctccttccctggagtgtggcaggacagaaaggcagaccaggaggtgggagtgcgggtgctgaccaaagttggtaacttcagtagaatctcactggcttgacaagataacccaggtcacataaaattctttgctgttgggaagtctttttagaatgtttggctagaggggagtttagaaatcatctagtttcatgcttctttactgatttgtgatcatgaactatcattcatcttctttgggtaacaagtaacaaaaatataaaacctcaaactggctgaagccaaaaagtgtatttgttggcttatataacttctgggtaatgcatttccagaagtagaactagcttcaagcttggctggactcagtgacttaaactgaatgcatgtccatcaggacgggtccttctccatctctcaactgtttgcctttgtattggctttagacctctggagaccttctttgcatggtggccttgagtagcattgggcatttatccaattagcttagcaacccgagttcatatcactgcagcaaatattctgagacgacactcattggcctggcttgacacatctgctcacaccagaaagatggctccaggcacagggtatagtgagcagctgctatttttggaacccagcacactttcaccatataggagagccctaagtttcctgcagcaatttacctccccaactcgcagtccataagctgaccaggcaatcagtgtccctggccctagtgactggttcaggggagtcctatggcttcagccaagccaatcaagccaattcaggggaaaccatggcttttgctttccacacgagcaaaggtgttagagtctcttcctctctggacttgatgttgtgagggtgtcaggccgaaggtcagtgcattaggccattcttgcattgctataaaggaatacctaaggtgggtaatttataagaaaagaagtttaattgtctcatggttctgcagactgtacgggacgcatagtgccagcatctgcttctggtggggcctcaggaagcttccaatcatggtggaaggtgaagggggagcaggcatctcacatggccacatagggaacaagagagagagcaagaggagggcctgcattctttcaaacagtcagatctttcgagaactcactcactatcatgaggacagcacgaaggggatggtgccaaaccattcgtgagaaaccccgcaccccatggtccagtcacctcccgccaggccccacctccaacactggggattgcattgcaacaggagatttgggtgggacagacatccaaatcatatcagtgagtcagtcatcttgacaccacaaaggaaaatcccatgagggtcccaggggaggcggccctgaaagatgaaatcatgtgagcatttgcagcaagtggtacctggagccggccaatccttctgagcttttgcactataaaatccagtcaatccctacagggatggagagtggttgttgaatgggtacagcgtttttgtgtgggatgatgaaactgcatccatctggagatgggtggtggtgatggctacacaataccgtagatgaacttagtaccactgaaacaattgtgcattgaaaaatggttaaaacggtaaattttattatgtatatcttaccacattttttaaaactacaaaaaactcttaataaattcctcttttgtttaagtctgtttgaattgtggttttactcttacaaccacaagtccaggtaacactaaagacatgacttcagcttatttatttattttgtaaaaaatacccaagcatatttaaatatatctgccctgtgtcctatcccctcatgggttccactggcaactaaagaaacatctggactaaggttttggcaggcaccaatgcactactcttttctgggtaacacttttgtgtatttgtagagacttctggaaggagtgcttcgaatcctaaagcgtgcctctagtggtagtgctgaggcccaggcacataggaggctttcccacaaatccacaggtagattcactcagcaaacaagccctcactgacaccccacctgcacctgggagtggcggggctcctgcacactggccagcagcctctgggcattccccattccatagtagaggcttctcttccccctacaaggaacctgagtgtggcagggccagccaggcaagtcctacccacccacccactctgcttggccctaagcacctaaaaatccaaccagatttttatccctcgggccaatctcgtgtgatttcctggtgacaggtgctgtcagatcctgaggccatggtggggcaggcagtcggggctcccctcccgcctcaccttatctggctcccttccctgccttccaacctctaaatggttattaacattacaagcagcattcctgagccagctgtagcctctctgatcggtcattgatgccatgatagacagaggatcctcctctcccttcaggggctgggacatatctgcccacgatccccccctctccaatgaccgaagttttacattatctgctaattcactcattcatttacttgttcattcatttattcattgtggcccctgcagcctctctctgtcacctccctccttcctgcccctgcaagcccgcccccagcctttgcccttgctgttccctctgcctagagcacccttccttcagagcttcccatggctacctgcttctcgtccttcagctctgggtcagacgtcaccacctcagagaaggccttgttgaccaccttgtctaagatgcactttgcccctcagacatctaaattttcactctactcatttcctccatggcatcagcattatctgatcattttcttgtcagttgcatctggcgtgcttgttgatgatctgtccaccccaaccggaggaaaaagagtaagaggggcctggatacttctatgtttctggaggtcagaaccaggtccagctccaaactggtgtttagaaaataattgttgagtgtctttggttgggtctccccagaagcagaccctgagaccgggattcaagctcaagaagtttatttgggaggtgcaggaaatatcagtataggagagggcaagtgatgtggggaaggaaggcagcccatgcagggtgccatcaagcagctggagcttagtcccactggggccctctgggtgactctgtagctgggtgacacatctcgaagctaccccatctgggcagtgaaatagctggtgtatttattttcaaactccctcagtcatgagtgaccactccgggttgctccctggaaaggaggaggcattctttccaggtgcttcctgacctccataggcacagcagggctcatctcagagtcctgtgaaagcccgcaggcaaagggatgcaggtgctgctggctagaagtcaggctggggtgcactggggtaaagaccaagggggcacaggtgggagctgtcaatatctgccaggtgaataaacgaatgaatgaacaaatgcagtcattcattcattccatcagcctgaatacctacaacataaagtgttgccaatggagtgatgatttagatacacacagttcttgtctttatggagctggaagtctgagaaggggaatgggaggaacaagcaagaaacagaatcacaaatgtaattgtttaatttcaattgtggcacgggctcgggctccaagatgaacaggagctctgaatgtttgcaaggtgggtgcctgaggctggccaggatggtaggatctccctgagaaggccacattgaacctgagccctggtgaataacctggagggacagcaccacagacaggaggaacagcattacggaggctctggggagagaggagcgatctgttggggaatcactgcaggggagtacatgtctctgcagacttctgtttccaattgcctgctccacatctctactagacgtctaataaacatctcaaattaacacagctgaaaataaattattagttttccacttgcagacttgcttcccttccacattttccctgtcccagtccatggcacctgcactctccccagcttctcaaatgtcaccctgtcaagaagatccctctgaccacccataagaacatgcagtaaagccccaccacagccttccatctccccaccctactttgcttcttcatggcactgtcatcccctgaccaattatctgctgtatttattgtttgcctcgctgagatggaaggtccctgagagattgaatggtgctctgttccctatgacatccccagcccctagaacagccagtaggacatataattaatgttcaataaatgttagaataaatgaacacatgaacaaaaacatgaatgagtgaatgaatgattcagtctctgccagatgtgagcgaaggaagatgagggctccgtgtgattctggagctcggacctgggcattggagtcccgatgactttggcctgcccttgagttctcacctcccagcacactgcccagcctgccttctccagctgctctcatgccttcagcctccctccatttattccctgagcccctacacccgcagtgacgtctcctcaccccacaggaaggtctctccttcctccttggcccagcttacatgcatgccacccagcacagggacaagggaggtaacaccagctctacatcagacaggccacggctgcatctgaactctaccactcgggcactgcacagcctttagccctgcgtggacaggtggttaaggcggcttctcttggtgctcatggcccttgccatccctttttctgcagcgtgggtgcaacctgcaacctgcttctaggcggtagaatgcaccaagttggtgggaggtgtgtgactgagggttatggaggtgcttatgtgatgacggtgcaggagatgtagcactgcacctattttatgggtctccctctccctggctggttttgaagagatgagctgcagtaaggaggcaggtgtgctggggaaggcagttagcgaggaacggtgcaccaactcctgaccaacagaaactgtgagatcgtagacaagcgttgttccaagctgctaaatttgtggtgatttgtttgcagcagtcaataactaatagggttacccacttttcagagctgtcctgaggacggaggtaatatacatatatacatatgcatacggacatacacgcattacattacgtatataatatacatgtagggctaggcgtcgtggctgcaatcccagcactttgggaggctgaggtgagagaatcacaggagccctggagttcaagatgagtctgggcaacacagcaaaaccccgtctctacaaaaaatacataaattagctgggtgacgcatgcctatagtcccagctactcaggaggttgagacaggaggatcacttgagcccgggagttggaggctacagtgagctatgatgacaccactgcactccagcctaggaaacagagcaaaattctgtctctaaataaataaataaataaaaatatacatgtacatacacatacacatgtactgtatatatcacgatgcttggctcagtgcttggggtgtaacaaatgtgtgttgtctccccctcccttatcttgcttttggttgccatgatgagtggtggccataactggaattcagtgggcactgaccagagatggtcaatgtcctgcaatgcatggactgtcagcacactgacaaattgtttcatccaaacggccaatgacagccccattgagaaacctattggtggttatagttagatgatgtaagctgtaaatcctcgtaattgggcacatgtacggtgcagggtctgaaaacaaacacacacgagtggacaccactgccaacctcccatgaggtgtgatgttcctccgagcctcagatgccttgggtaggtttgtgttgcgtagattctgacaaagtgagggtgcccctgacaatctattattaataaatataaattaggcttaatttcttatttattagataagaaatgtaaatcgaatttttgatattttcttcccgtgccccaaaggactatcttgtgcttcccagtttgggggccacaactttggtacagaagttattcatcatagcagttagtagagacacaattatatcatttaacaagatttctagagcggtggtccccaaccaggtatgatttgccacaccaagggatgtttgacaaagtctggagatatttttgttattgtcatgagtgaaatgtgggtgctactggcatctagtgggtagaaaccagagatactgctcaacattctacgatgaagaaaacagcttcccacaacaattatctggtccaaaatgtcaatagtgctgaggttgagaaaccttggtctaaatggaagcagtttcagggttgattcagtagctcagcaatgtatagactctgagtgcctcttttttgtttttgtttttgagacagagtctcgctctttcacccaggccagagtgcagcggcactatctcagctcactgcaagctccgcctcctgggttcacatcattctcctgcctcagcctcccgagtagctgggactacaggtgcccgtcaccgctcccggctaattttttgtatttttagtagagacggggtttcaccatgttagccaggatggtctcgttagccaggatggtcttgatctcctgaccttgtgatccacccgcctcggcctcccaaagtgctgggattacaggtgtgactgagtgcctctttgattcttttggggtttctcctcctggttgcaatatggttgtcacagctccagacatcacactcatcattccaaacaaacaaaaaaaaatctggctttctgtctccttttttctccccttctccttctccctttccctctttctctctcagagaaaaatatggcgagtgacacatgctgggtcacatattcacccctagtctaatcactgtccaagaaagactgagtggctcagattggctgggattgactgactcacctcaagggtctagattcagtacctgggaacaaaaatcaggattatatgagcaaagaagagggaatggctgttgggtagtcaacttgaccaacagtgtctgacattgagaattatttcctttttctcttcttatggtttctaccaacaaaacaaatcagatgaataaaaaaattccttgctcttccaattacttcccaccccaaaatccacctttgctgatctgactccacttcttcagcttgctggagaaaagaggaaaagtctttccactgtcccccatcagattgcattgggtgcttggtgtgctttggaacccaggtcaataggattccccttccagtgtccctttaaaaaacccaggccccctctccttcccaccagaagtctcttgctggtcctgcagacctaagctgcttatagcagcagcgaacatccaagttcactaaagaggcctgaccccagcaaggcaggtgggagttaagcaacctgagctggtccacaaatgccagacagctgtgcacatctttggggcggagacgaaaaacagatacttaacgtatctggttagaaatgaggattttctggtttggttatgcctgtcatttcgaatgtgtctcttctaatatttacagcatctatgcacctgaccttgtcagtttcaccactgagaagcaacatggtaaaccatcctcagagtatgacccagaggcttgggggtgttctctgcccagcctcaatccctcttaagcctttgtcgggggacaagtctgggtgaagatgtttatgcagataaaggtttgccaagctgcagataacccttcccatttagagaaactgctctcttgattcagccttcctctgtattcgcccccaaacctaggatatctgaccagtacccagttccataatctcaaggcgattcttatttcctttctttccctcatacctcacatctttctagcagtaaaccctgtgggttcttcattaaaaatatatcgactaggcacagtggtccatgcctgtaatcccagcactttgggaggccaaggtgagaggatcacttgaacctgggagttcaagaccagcctaggccacatagcaaaaccctgtctctacaaaaaaaaatttaaaattaactgggtggggtagcacacacctgtagtcccacctacttgggaggctgaggtgggaggatcacttgaacccagggggtcaaggctgcagtgagctatgattgccactgccctccatcctgggcaacagagcaagaccctgtctcaaaaaaataagaaaagaaagaaaagtaaaattaaaaaaataaaatatatctatctcatccacttttcagcaccttcatggccactgctcttatctaagccaccatcatttctaaattagtgcaattgcctcttcactggtcttgtttctggtcttgccaccttttcaagccactctccatacagcagccagagggatctgctaaaatagaaatcagatcagggccctaacctgcttcaaatccaccaatgatgaatcgttgtgtttaggagaaaatccgaattcctggcaatggcctctcgagccctgtactgcctggttccagggggtcttactaacctcacctcctgcctcctgcctctctctcagcccactccagtcacatgggctcccacctcctctccctaatcgctgcaaattcagtcccacctcacagctgcagaatttgccgcctcctccctcacccaggaaccctctgtcctcagaccttgtcatggcttactcctcgtcattcatatctttgctcaaatgccaccttctcaaaggcttcctgagcactcctgtcaacgtagccagcccaccctatcagccaccctggcaccatcctgttctattttcttcatttctttacttgactaccactttcctccccttatacaatgttttgtctgtgagaacaggcaccatttctaacttatatgatgctgtattctcagcacctagaatgatactcggcacatagcaggtgctcaataaattgtcctcaaattaatgaagctcattagtggccccttcacccaggagtcatcccaacctccccagcccctgggacttctgtcctctctgggttcccatcaccctgaccatccctgagccagctctgaggagaggagaacgctctgggaatgcctgcctcctcagctagacgccagactcatcaaagatggagcctgacgtagatcctgctgtctcccccacagcatgagtgctggatatgcagcagatgtagaacactgcctcagcatcaaaacacacctggcacaaaggaaggctcagctcttcactccatgtgaactcaaagacatcacagcgtctatcaaactgtgcagcatctctgacactatccttccatttctaggactttatcccatggaaatattcacttaagtgtgaggaaaagatgcatatagagggtgtttcctactgcattgtctgtcctgggggaaaattggaacctacctaaaagctaaattgtaagggaatggctacacttgccgtagtcttcccagtattgtgagatactatgtggcaatttaaaatcatcagagggctgtatgggctgactttcacgttcttggatactttgttatttattgagcacctactatgtgccaggcagtgttctaaatatttgggacttaacagggaacaaagaagacaaaaatatctgctagagtcaaggaagacaaacaaaaaacttaaagaaataacatgccagatggttgataagtgctgtggagaaaaggaaaacaggaaagggggaaagggagggtatcaggtggagatgagggtcttgggaacagtggggagcagggtttgggcttccaggggtgacggatgtcagcacgatgagcatgatgagattagtcctgctgatctccatgcagatcaagtagagaagaagggtctcactgagacctaggcggggcttacagtgcaatatggctgtcttctgctgcctcctccaagtccagcctggaagctggctcatggaagttaagctccccttcctccagcttcctgtaggttcaactagggggaagccccagcaggagacaggtgcacagtgagggctttatccccctttgctggcccctgccaggcaccgaggcttcaccgtgtctccacagaaggctctctccactctgcacccttgttggttccccaggcccactgcaccattcttacagccttcccactggctacccacagctctgtaaatattacattcattaaactccctgtattacccaggctgactgtgccatctgtttcctgagaggtcctgacacacacacagagtgtgatctcattagctagaaaaagtcaaattacccatggatatacaggcatggagactcgtttagaagcaaacatcaaactgtcaataatcactacccaagggaggtaggagaagggatgtccttgaaagacggtcttatagaaaaagagagagagagagacggaagggatggagggaacttcatttgcaccttctacttctccatgggctttgttgtatgtttggttttttataatgaatgtgtactggttttctaatttagaaagtgcagaactggaaacaaaatgccaccagccccgctggctctgcagtagcctggacagtgtatacactctctggactggcagagttggcaggtgtccttcttggggagtctgtgtggagcccagggacagctgactctggacagtgcctgggtccctcaccgtcccctccccagtgcctgatgcagaccaaactctacccaaaaagtcacctaaattgtggttggtttttttttgcaataaacatatattgcctttgttctctctacatgtatatgtagatatacacaaacacatatacaattaacattattatatatacaattaacaagtaattaacacagttgacaactttgtggttgtgtgtgtatactcctctgtaaggaagaacaggggacatagcatgtaccacagactggacactgttctcagtgctttgcacgtcttagcccaattcctttttgcaaccgctctaaagatgagccccgttactgtttgcatggataggttgagggggtggaggcatgtacacatatatgtaatgatccagcatgttaattgtgctatacaagtcccccatatcttctactcctgctggtcacttttgagcttgtcatttctcagatgcggagggcacagtgtgctgtgcacctgcagcccaggggttctgagcagcagctctggtgccgtgctgcctacgcttgagccctgggttgacatttgcgagctgtgtgcccttggggaagacactgacttatctcgatccctcagtacccccagtttacaatgggatcaataatggggaccacctttaaaactgtaaaacgtaaacagggcaatgtgtaaggtgcttagaatagtgtccagtctgcagtgtgagctacgacccccgttcttccttgctggtgggtcttgttagttgagcaatgttccccactctgagtgacagctggctagctcatcactgatctgagcctgtctttgcagtctgttgcttcactcgtacctgaaaggcacagagtgagtcactagtcaatgggtctttcagggaaagtcagatgggggagggctggaaaaacatgtgctttcctgacaaacggtttacttacaactgtcattactcttcatttcctcctgctttctttctgcctcgacatcaggtgtgatgtttggagttatagcagccgccttgcaaccatgaggcaagaagctggaaagacaagccaagagactaaaacactgtgacatcacatctgacaaaattgagccactgaaccaatgccagcagctgtgtcctccagatttcttcttatgtggggcaagacctttattatttaagccaccagtggtctgatagtgttacctgaagccaaacagactcctgtttgaaacagtgtgtttgtttcccacttatcattgaggatctgtcaatgtctccctctctctctctctttatttaatctccagggcagaatgacgagttaatcctactcctcgggtcctggcacatcatcattggtccaatctcgagagattgattaattggttgattccctttcattccctttccctactttctttcctttcccattcataggcagccattctaatgcatgtaatatattacatatttccaacttgcaggcattcatatgtgatttgcattgtcttgtgtgcacatgtatttttatcttatataaatggtattgtgccgtatatcttttgcttcttgcactctgcactgtgttcttagaatccacgcatgttgcaatgtgcgtgtctcatccattgttctaacgctgctcagagctcccagagtgcatcctccttgtggtggacttccacgtaagttctctcccctcaccaccaccactaatgctagaatgatcatcattgtacaggtcttcttatgcactctaatgataactcatctggggttgatatccagaagaggaatggcggggtcccatacttttacatgtacttaattagattcaacagtgcctgctgttctttagaatggctgcatcagactatcctcccaacagaaaatttttcatcctttttttattaccttttgcattttgagtttcccttgttaggtagactaatattcaaggctttctttcatggggttttcctgttgttaacatgcaatttctctctttgtccatttcaaagctcttcaccttgaattccatttagttgggcctcagagcctgagcgtttcccaatttttcatgcagcctttctgactcaaagctcgtgcctgctaatcctgtatgatcaagatttatgtcaatgcctgcagttcacgcatgcccactgttaagatgggataatgcctcatgatggattcttcaaaacaacagcctttgccagcaaagaaaaagagacagactgtccaagaggtaaagtgaacatctgttgtttacgtctgcccagaatccattccctcttctggccatggcaccatagtttttgtctggggtccacccctcccccacttctactctgtgaagctccgtctctccccaagtccagtcctggctgatcagagtatccacactcccagccacagcaattggttcagcagtgggcagctgacccaggccatttgataaaatgttgaactagcacattagctgtaactctttaggaagaggtgttctcttttgctaagatttctaagcttgcagagtatagcctgaaactccctgaaatgggagacagagttgagagagagagagataaagggaaagagtcaaaacttcattacatcatcattgagctactggattcagccatggctgaagcccaattacctgtttgtttcaactacgtggctcaataaaatcccctatttgaatgagacagcttgagttggatttccatcccataccgctgaacatgcagcatgcattggtgagtgagtggtagagagcttcagtgataatacagtgagtggtagagagcttcagtgataatacagtgagtggcagagagcttctcccagggcctgtgggaaaaaaaaaaagccctgtccgtcaatcatctgttaggcaactgcccacttcttcaaactcatatcttaccatgcttcccctccctgactgtgttccagccacaccagcttcctggctattctgggaacacactagcttgtcctgtgcacttgctgttgttccctctgcctagagtgtccttctgccgaactgccggattgtttccttctcatgcctcaggactcagctcaagtgttaccccctcatagggacctccttggcaagcccctctcgatgcaaccgtcagtctgctctgcagctcagcacagcagccacctgggcgatggcttcttgggcatttggtcctttacttggctgttgcttgtctcctctgccagaattaagctgttttgtcaccactgcaacccgagtgtttacgcggatgcccggttcatggaagatactccataaatatatgtgaaataaatgaaggaatgaagaggttaggaggaagagagaaaagaaaggaaggcaggaaggaagggcagaaggaagagaaggagggggagaaaggcaaaggaggaagggaggaaagtcgggggcagggaagggaggaggaggaggacggactcactcaaatgcttcaggtttaagggtcacttcttttttgttcataccctcagacttggcccaaaagcaaactcagaaacaagagtccttgaaatctcatctcaaatgtccctctggcctgctacttaattaagtgaccccataatgaaatttcttcccattgagtctgtatttaataattaattgacctcttcagcccagccaggcttggaggctcatcaattatacatctttcccatctgcactcaacactcacctcccaggaaaaaagagtccaaagaggagaggctgggagtgactggaggcgagcactggctcctctgcggggtgaagttactcccagaatggtgacctgctagggacagatggagaggaatgaaaggggctagattcaatctcgggcctgaagtttattctgaggcatcatcttgcaaaagacaaaattagtaataaaaagttaggcatgaaagtaaacatttatctagaaaagctaaataacaaccaattactttgttatggcaaaacccacaaaatcccataaaaacaacacaatatttttattaattaactaattgtctggcctgcttgaagtgtcatcaatttagtgagtatttaagactagctactcacacctataatctcagcacattgggaggccaaggtaggcggatcacctgaggtcaggagttcaagaccagcctagacaacatggtgaa[133 bp omitted]acaccactgcactcgagcctgggcgacagagcaagactccatctcaaaaaaaaaaaaaaaaagatcaaaaaaaaaaactagttacttacttcacaacaaaatttgaaatggcctgaatgttttagctcctgtaggaaaaaacttgattgtcattttcccttttggccagactctttgattgtcttttctcatcaatatcattttctacagagagcagagagaaaagaaaggtaactcattcttttctttagaaagttgatcagaaaaaaaaaagaaagaaaaaaaaggaaaagaaaagtctgaccatttagaagtttcttttggctttgtaacctgtcagggctgtcactacgaagtaacacagcctgtgtgccttaagaaataggaatttattttcttacagtgctggaggctggaggcctatgatcaaggtgctggcagagttggtttcttctgaggccccctccttggtctgtagatggccgtctcctcttcacacagccttccctctgtgcatttctgtgtcctgatttcctcttcttaaggacaccggtcatattggattagggcccaccaatatgacctgatttacacttaatctttaaagaccctccctatctccaaatacagtcacattctaagacactagggttaggacttcaacatataaatttgggggaggaacacataattcagctgacagcacacacatttacagggcagttgtcaaatttggggaaaccactatcaagtttctttcctacatgagctaaaacattttaaggcatttcaagtcttctaagcacagcaactaacctaaaatacctgatgcgttggtaactcttctcaaccagtttgtcaatgacatctctgtgctgtgatgcttcatcgggatcagagcgggcaggtggcattttctagaattccattctcacacttgaaggacagcaatgatttacccatagagacaactgcaagccacatacaatatgtcgtggtagccaaagtgaatgcaatcccaaccaaaccccgctttgaccagaccccaacagcgcccgcggccaccccagcaccactccgtgcaagggaaagtgcagggaaagtcaaaagacaaaattagtaataaaaagttaggctgggaaagtcaaaagacaaaattcattttattcagctgtgactccgtagtgcccattgccatctaacatagtacatattggtttgtttttgttagcagaaagaaacagtggtcttaatgggctgccattcaaatatcttgcttttacaaatttcacaaacatgtgccttgatttttacaaatttcacaaacatgtgaacatagcgttagggcccttcccagggctttggaatgtccctgggcaggtgatgggccctgaagcttaaactttataaacttcccagtaaatctgcctccaagtgggtccagattgtgagcttcctctcctgcaaccccatgcaacccctggccaggccagagttccaaaaagagagagaacaaacagagcttttttggtgttgtgtttcttaaggccactgcccacctgaactgcggcaattaaccacagagttgaagggttaaaacaacagaaacgtgttctctcacagttctggtggccagaactccaaaatcaaggtttcagcagggccacgccctctaaagtttctacaggaggctcctttctggcctcttccagctgctgggagctcctagtgttccttggctgtgaccacatcactcccatctctgcctccatctgcacgtggccttctctccgtgtctctgtgcgtcttcttcttgttctcttttaaggaggctggtcattggatttagggcccacactaatccaggatgatctcatcttgagacccttaccttaattatgtctgcaaagacccttattccaattacggtcacattcacaggtaccagggttaggacctggacatatcttttggggaagacactatttaactcaccacaggggggttaaccatgttctcatctttcatgaccattaaggagagcaggcctaggcctcagtggtttaataaaggaaagaccacccttcatgcctaaaaatcccaccattatgactccccttaaggctgcttttatccatcacctgcaggctctggaagcaaatgctctgcagacaggtttttctcccacccaggagttgcccagacttcaacctatttctcaacttcatggtgattttcatatccacaaaccacttcattaatgttttaccatccacttaatgttctccttccaatagatttatttttaaaaattcagcctcatcctaagcagtaatgcccttgaaattggggcattgatgtgtcacttctattttttcctatacatacttgaacaactggagtttgcatgtattgatctctgcctttgtgtcatagctaagtcctggtgatttcatcctcacgtcaaccctgcaaggaaggaactgttactaccacccccattttacagttgagaaaatgtaggtagagaaagggtcagtaacttgagccaggtaagaagggacaaaatggagagccctgggggaagggacagaggaaggagaaaacagactgcaggctggttcttggtgtgtaagggtggatggggaagcaggagggagagaacagggggaggagaagggaacagggcaaggagagaagggaagcggagtttcaagggatgaaataaatcctgagcccagaagtggagaaaggtcaccaggtcctcactttgcagaagtcttgactttgccaggcactgtattccatccataacaatgagacagaggtctgtcctgtagatcagagctccactccatcgttcaacatagagattcaagatgaagatgaagggattttattgagggcagtgggggtcacagccaccccccattgccctgggaaagaactcctttagaggctcgtcctttagcccctccccatcaatgctgacacagccgaggttgccgctggctgcccacctgaaattcccctatcaccaacttagcttctccctgcccccatccaaatttcccctgtgggtccctcgggctcaataagatgctacaggttggcccagaaactgagtggagctggagcgttcctcactcacccctttcatcacagctgctgtgaactgagtgccaggctctgcgctaggccctggggatatgacaatgaacaagccaaagtcctagcctcccagaggtgacattccctggaaagtattaggatgagccagctgctgccaccaacaagccttgaatctcagctgtttaattttaaaaggaagaaaaagtttatttctcattcacatcacagcccactgcaggttggcaggtaagggcccgagggaccctacgagttcttccattcaatggctctgccgtcgtgagcctggcattcttaacccattgcgtgcttctggacctctttgtgtgatagtattttaaaatccttcaattgtcattaaaaaataaaacacctaggactatgaagaataccaattatattgaaacataattatccagtatttttctcaattcatcacttagtaatatgaattcttctttttaacacattaaataacaagacctagtggcagatctgataattactgtaatttcaaagtagtaatgagtgtaaatctatggtcagcaaactactacagatgggccaaattgggtaaacatgccacctgtttttttcaagttttattggcacacaaccatagtcatttatttgtataatgtctgtggctgtgtttgttctacaacagcagaatcaaatcgttccaacagaaactgtatggcctaaaatatttactatctgtgtctttacaggaaaagtttgcagttaacagtatttttgagacatttgcagcaactgtcatgtaatatgaaggcatttatggtttctagggaaaaagtcacaggccttgctgccaccattgtggcttgttggctacattcattattgaagaaaatgataattttcaattcaaggtgagtaaaaataaagacacaatattttaaagatccaaattcagagattccccctctgccttttagccacagatctctgtaggggggtctcaggactgatcccaggttagaaagcccaggttaaaaaaccctaatctggccgggtgcggtggctcacacctgtaatcccagccttttgggaggctgagccaggcggatcacctgaattcaggagtttgagaccagcctggccagcagggtgaaaccccgtctctactaaaaatacaaaaattagccaggtgtggtggcgcacgcttatagtcccagctactcgggaggctgaggcaggggaatcgcttgaagctgggagacagaggttgcagtgagccaagatcacaccagtgcactccagcctgggtaacagagcaagactgtcaaaaaacaaacaaaaaaacaacaacaaaaaaacaccaacaaaaaaaacacctaatccagggcctcaggggctctctcccagatcctctgcacccacaggtgacaagggaggagagcaagtatggaggatcctgcaggaggttttgtagcccaagacaaaaggtggcgtccatcacttctaccattttcagaactcgatgacagggtcacgcccagtttcaagggatgctggaaaatgcagttaagcggtgtacttaacacaaatatttcgtagagctaacaaaaacaaaccaatatgtactatgttagatgggaatgggcactatggagtcaaagctgaataaaatgaatagctaattccagcatgaaccatgattttaaatagcatggcaaggaaaggcacccctgagaaggcaacattgaacaatgatctgaagattccaagcctggggctttctggggaatgatgttgctggcagcaggaatagcgtgtgggaagggcccgagggaaaaatgcaactatgatgattttgaaggcctgagattcagtcacagtatatattttaatcgtttgtctgtttcttgtctgtctcccccactagaacgccagcccatgaagaagaaatttttgtctattttgttcactgctctttcctaagagcctagaggcgtgtctggtacatagttcgcacctgtttgtcaaatgctgccggaacatggcacgatctgcctgctctagggagacaggagtatggaatgagggcagagaagtctccctccagggagatcgcttagggccataggccatggtggggatcaacattttattctttaggaataggaaattatcggagagtcttcaccaccgagggatgagctccaattttgattttgcaaagatcactctggctgctacagtggatgctgcggcaggtgaaggcttggcaaagtgtctgacactaagaaggggagttcagtccaacagcctctggggcagtgagtgagaaggtgttttgagaggcgaagtatgggacctggaggaccccttatcctggagtttcactgctgagaaaggcctcaaattgggcctttggaaattacatctcaatgagctctcttctcagtctcaaggactgaggagcttctgagacacagtaggttcaccatgtacagagaggagactgatggcaccccctgcagccacacactctttcggcagggctctaggcagctctaattgcacgaacttgtcctataaacatcttaggcaaaagcacaattttattgcgccttgatttttttttttcttaggtggagagttgttgagaggtcgatgcagtccacgtaaacatgtaaaacagcctaacatttcaaaaccctgctattttttgttaggttggtgcaaaagtaattgcgagttttgccatgaaaagtaatggcaaaaaccgcatattacttttgcaccaacccgatatgtccgtaaccggagcaacggaaaacaaacaaaaaaaagaggtggaaagactggctccccacaactgagagcctcgtggggacagccctggactgggagtcactggtggagctgcctctagctgggtgttcctgggtgcggggctggtcttccctggccaccgtcttctccaatgagagcgatgacaggatctaaggggccccctggcgctctaaggtcctggccagtggagaccctggggtgcgacaaaggggttagggggctcccccctccccgcccctcgcccccacctttccccctcgcgctgtctctccaaccccatccaagccccaggctggaaagccccagggaggccgccacagtaatgacccctcgacagctgcgctccccgcgaagcagccgcccccaccccccgggcccccgccctccgccccgccgcctcggcagacaggttcgcacctgctcggggccatttctcatcaattaggccttggcagcgcttgaatggggcccagctagggtgcgtcccggctcctccccgcgccgccccctgtctccccccaccagagccgcgctcgcagatggcagctcgggcgcagctgcccgccgggctcgcgggggccacaatcggcccagtgttcgcagcccccaggttggacagggggccgggcacacctgcgcggcgcagatggcgccggggggcggacagcaggcaccaaagtctcctccggggactgggaggcgggaagagagcagggccccctcaccgcaaggcggttcctgtcggaactaggaacctgtagggaagaggccatcgagaaaatgaccaggggcagcgggacccagccatgccctagtccttctcgtttcgaaaggagggagtcttttttggatagtagcttggtaacctaaatgcccagcgataggggattgactagaaaacgtgtgctgcgattctgcagggcacggactcaaccattaaaaatatactaaagaaaagcaagtcgggaagagggatgtgttgagtgtaacttttggttgttgttgttgttgttaggtagggtctccctctgtcacccaggctggagtgcagtggcgcaatcacagctcactgcagcctctacctcccaggctcaagtgatcctcccacctcagcctcccaagtagctgggttttttatttttgtaggcgcaggttctctctatgttgcccaggctggtcttgaactcctggactcaagcaatcctcctgtctgggcctcccaaagtgctgggattacagctatgagccactgccgcacatccagtgtaatcttaatttggggaatctgagtttgagctctggtgtcatctcttttgagcttgatcaggtcactttacccttgccaacatcagttttctcatctgtagaatggtgtaataagagagctgttgcaggagttaaatgagacaatgtgtgaaactgcctagcctaggtgctggcaaacagcaaacacctgtagtaagtattttttattatttcttattatacaagtaatacatactattcactgttaagaatccacattttatccaattatgtaagattaaaagctaaactactctataatttcacctctacctgagatcaccattgataacagttttgtgtcttgccccatgatttttttttctttttctcttttttttttttttttttttttttttgagacagagtctcactctgtcgcccaggctggagtgcagtggcacaatctcggctcactgcaacctccacctcctgggttcaagcggttctcctgcctcagcctcctgagtagctgagattacaggctcctgccaccacgcctggctaatttttatatttttagtagaatgttggccagggtggtctcgaactcctggctgcaagtgatccactcgcctcggcctcccaaagtgctgagattacaggtgtgagccaccgcacctggctgccccatgattttttctacactatatgtataataaataaatacagatagatctatgcgtaaatatagattccagaatcaaatagaagaagtttcacttagaggctgaaaccttggagtctggagctagacttcctgcactaaaaaacctggctcttgtttccctgctgtgtgtccctgggaaaactacttaacttctctggaccccagtttcctcatctatagccttgtaggaaagttgtgagattaatacaaaacatttccaacagtgcaaatagaaatatgagcttcattataggtgtggttttgtaactttcttccttaatatgtcttagatgtttttatgtgttggaaaatttgaaataatattctttttaacggctgtagaatatgccaccgtatggctccatgtaagcagccgtcttctaagaaggactggactggtttcccatgctgcggtgagcactcttgaacacactcttttgtgtgacagttcccctaacgtcaagcctgaggggtggtatctgctggataaggccccttatggtctggcacaagcaggatcagaagtagggtgaggtgagtgaagcattcaggcacaaaatttaagaggatgccccaaaaactcagtaatcaagataaattgtatcttaatgcaatatttttaaaaatcaaaattaatgctaaaaaccatccataatgagcaaaatatcaacgttttaaagacagcatctgacagtgtcatactggctttgttgagcctgtggccaaaggaaaaacgtgccttcatatacatattttaatgtattctttaatggtaattttctcccaaatcgttgaagtagttgaaaaatatacactgaaaagttagaagtaagtgtattaaaactcacagcattacttatgttttattttatttataccccaaacagaatttgtatcaattttactttgctgggtttaatggaagcaaactcatcgctaatattttcaaaatctactcctggaaagaatttaactgtgaaaaaatagattatttatatgtatgaggctagccgggcatggttgcgaatgtctgtagttccagctactcaggaggctgaggcaggaggatcgcttgagcctgggagctcgaggcttcagtgagctaagatcgagccactgaactccagcctaggtgacacagtgagatcctgtctcaatgataataataataataataataataataaggctgggtgcagtggctcatgcctgtaatcctagaactttgggaggccaaggtgggggcggatcatgaagtcaggagttcaggaccagcctgaccaacatggtgaaaccccgtctctactaaaaaaaaaaaaaaaaaaaaaaaaaaattagccgggcgtggtggcaagtggctataatcacagctactcaggaggcggaggcaggagaatcacttgaactcgggtggcagaggttgcagtgagctgagatcgcgccactgcactccaacctgggtgacagagtgagactccgtctcaaataataataataatattaataattttttaaagtcatatatatgaaggctgcacattttccctttggcctcaggcttcaaaatgactcaacaaggtgctggtatcgttaatttgcctttgcagagggtggcaccaattgatgcttccactgacagcaggctccattttttcaagcaccttttgggattaagctgctcagcagagggtcattatccccacatttgggccttcatctgggaggagccaggagctggtatgcctacctgggctggctttctgtcctccctttcttgtgagagcttcccagatgcctctgccaagcctgggcagctcaggttactgcagactctaagagctgccttatctcagatctgcaaagccccagcacttcattctcaggaaaaccttttaactctggggtagacaaactctaaaaactctagagctgccttggggcaatgacagcagctcctcgatggactagatctgggacccctgcagaaataatctcatgaatgttcccttacctgtggccagcaagacctgctccattccttcctttatttacatcctcagtggctaccctgagtcactgctctgatcagccctgagtcaaagcctgggaccgaggcgagttagtcatggtctctggagctcaaaggggcagacagacgggtaaacaaagagtttccaagactctttcatgtctgttattatctcaccacattgtccccagagacttgggagcacttgggccagatataattggatgtcaataggcatctcaatcttaacatgtctaaagcagtaatactaataacaaaaccactagtaataataataatagtgtttactgcacaaggcactgttataagtgctttacatattgtaactcactcagtcctcatcacgaccctctgaagtacagcttttagtttcattttacagataaagaaatcgaggcattaagggactcagtggcttgcctaagttcctgcagatgttaaatggcagtgctgggacatgtacccaagggtctggctccagagtccgtgctcttaacaatgaccctctgatcttcagttccttcccatttcccctatatcttccacatctcacaaagtggcatcgcacaaaaaaataaataaataaaaacatctatgcaccatttttattccactcttacccaattcttttcatacctgacttctcgtcatcactcaaatatcagagatgtctcaaatttcagttttcctgaaagcaatcactgagaaagggattcaagggtacgtagcttatttaagagatgagaggtgacggttcaaggagaagcattgaagaagacagaggagaaaagtcagcagatacagtgtgccttatcaagtcagccaccacaacaggtgaccacagacagcttcatccctccaacaaactctgggaaagagtgcaaagcacacagctcagaattattccgtctacacttcgagggagctgggatattgatacgctaactcctgagagtcattggttgagatgtactggggaggagtgtgcagtgttaaatcgtgggcacttcttccagccagcagcaagtccttccagtttcagggaaaaaaacccaggtaaagatgcagatactggcaattaaaagtcactagagcatctagggaccatttgctatccctcacctactcctcctcatctctttcttcttgtacgtaagacgcagaagaaaaggaaagcaatacagagtatatcaccaagcaggttttcagcgtgagcaaatagagcttaatctcactggggtgcttggggaggcagcacaaaatatgtgcctcagagtgatcccacctgtggggagagggagtggaggtatttatcctccaccctcgaattgattggttgagggctgcttctggggtattaacccaacagcacttctggcttgctctgaacatgggccaagcatgctcccagggccagaaaaagtgcctcaggtggagaagtgcaggtgtttgcagtaagcgtttttggtgagaggaagacagtacaagaggatggagaaggagcagcaccagtggctgcttcaaatagcttactcatccgaaggagaaccagatgacagtgaccatttagtaagcacctactgtttgcctggcttcacgctgagtgatttccttatataagttcactgcaaaacttgcttttatatcattacctttaaaaaaaaaaaaagaaggcaaagtttagagaaagtaggactttacctaaagccacatatccagataacatggtggactcaggattataaccagatctgtctgacctgaaagacccaatatttttttgcctcatgctatttctctggatttctctgcatctctgagattcacgattcccaccaatctggcctatcgggtaatatgtaccaaggctattatgagcactgaagtgaataaaatgctaatcctcatcgatagattaaacagagaaatgcttaaaccagagatctgcctgcaataaaagcaattgggttacttctttgtaatttgactgctcacatgagcccaggaacctgcgttatagctttacaaatctgtgataatttccttcaacttttccattttattaccgccattaaaatcccgttgtgttctttaaacaggaaaaaaaatgattaaaacagatgtggctcttaaagttacaatatgaattttacaaccccaggttttatgatactgagagaaacttcagccaccagggtcagaggcaagaaaaatgggaccggatttctgaaatgggtctggggagggggaaaggagtagggtgagaggttcagaatgacgaagacagccaacagagccaatttcctgacatttacttttctccccaaactctggggatcaactgcagaatgtcacatttgcagccatccctctgcaccacagagcctggtccccacagctactgaggtttgactcaactgctttccctccctccaacctcacttccaacccacgcccacacccccaccaaatcataattttccagttaagtagtccacagtgatcattgttttgttttttgaagcagtgttttatagtaaagagagcattgagatccaagtcccagatcttcaactaattcaccacgtgacttgggcaaatcagtggactctgggcttccagtttttcatctgcaaaactaaggagttgtaccagatctctctgttctctcttagcactgccagtctatgaccccatctgcaggaacacaatgccaggcacaaaggaagctctgaatatttgttgccagaagaaagaaatgatttcctaaatttgtctgtatttttcttttgcagggaatgaaggggttattaacttctacaaataaccgaaaaaaagaaggaaagcaaccataaagtttgtttccttttttatgtaaaaacagtaatggtgagaatgacaaaaattttaaagagcccatacacagtgttggcaaaaatgtgcagaaataggaagtcttctatactgctggtgggaaggtaaaagagtacaatatttctggagggtgactatcaaaatgttaaaagggcatgtcctttgaatctgcaatgtcactctcaggaaatcatcctaaggaaataatcagaaagatatatttagagcacaaaaaatataatataaagtccaagggaaggagagaaaaaatataaaaatttatatactgcattattgtaattttaagtttttttaaaaaaataactgcatagaaaataactgaaaagaaaacatcaaaatgttacatagaagtggccgggcgtggtggctcatgcctgtaatcccaaaactttgagaggccgaggcaggtggattacctgaggtcaggagtttgagaccagcctggccaacatgatgaaaccccatctctactaaaaatacaaaaattagccaggcatggtggtgggcgcctgtaatcccagctactcgggaggctgaggcagagaatcatttgaacccccgaggcagaggttgcattcattgaaccgagatcacgcctgcactccagcctgagtgacagagcaagactctgtctcaaaaaaaaaaaaaaaaaaaaatctctggttagtaagactatggactattttcttctttaggtatttgaacactgctctcactccctgtcttccttcaggtctctgctccaatgtcaccctgtcatcaaggttttccttgaccagcttatctaaaagagcaaactcctgctccttctctcccattgccctctttttcttacccacttttattattcttcactgctggacatagtatttataaatatttagttatatattaaattgtgcctcacaacacgaatggcaatccgatgggggctgtcttcccctcacctggtatataacagtcacaaaattgaatgataatttgaatgaatagatgacacatgcaaagatatatgggcaaagataatctattgtgctattgtttataaaagtaaaaatttgcaaatcaattaaatgtctaacagtagaaaattggctaaatgcaatatactacatttacacattggaagtttatgcaacacttatttcaagtttgtttttaacatatgtatgtgtgtaagcgtgtctgtacatataattgtatttttcttcctagcaataaaagaaatccacgttgtttgaaacaaatcaatcaacagagattagttaaaacaacaattcacacctgaagctttaatagttgggtcagaatcttcccatacgctttttttcctccatgcttgtacaaataaatgccaacaaatagtcacataaataagtttctcaccctttccaaaatctgattaatcatatacattgtagacatatattgatctaattcaaactacaacagagaagtcatgatatgaatacaatataatttctcaaattgttacgctatgtccatcacgacattcagatggtcctaaatttttgtctatataataaatgctgcaataagtatccttggtcatatatcccatattgatctttttgtttatgtaggatggatttccaaatgtgagacttctgggtcaaaggttccaagcgttttgtgtattcatttatttatttatttatccttgaggcaaagtctcactctgtcgtccaggctggagtgcgggcagatcacttgaggtcaggagtttgagaccagcatggccagtatggtgaaactccttctcagttgggcatggtggctcacgcctgtaatcccagcactttaggaggcagaggcgggtagataatgaggtcaggagtttgagaccagcctgaccaacatggtgaaaccccgtctctactaaaaatacaaaaattagccaggcatggtggtatgtgcctgtaatctcagctactcaggaggctgaggcaggagaatggcatgaacccaggaggcagaggttgcagtgagccgagattgtgccactgcactccagcctgggcaacagagcgagactctgtctcaaaaaaaaaaaagaaagaaagaaagaaagaaaaagaaactctgtcactactaaaaatacaaaaattagtcaagcgttttaaatttaataacactttcacaacacttttaatttaacaatactttttaacaatacatcaagaatcattgtagcaattcacatttcatcaggaatgtatgacagttccttcccatcttcaccaacccggggtattgccaatcttcccaatttttatcaataaaggagtacaaaatactctattaccatctagatttttttgaccatgagcaaggttacaaatattttcatgcgtatacgtcgttctgtgaacacactttgtccattttgctatttaaatgtttatctttttcttgtcaatttctaggagctctctgtagattagggacattatatctttgcctatcatttttttgttccaaatccccccccaaggtgactctgagtacatataaatattctctgaagcattattcaaaggttatagttgtattccttcatttagatattgatccatctagaattattttggtatatacaatagcatgaggtagagtttaacctaccttcttattaatgataccatttgttaatgaagcagtctgtttctgttgaatttaaacgccacctatatatattaaaaatatatatacatacataaatttatacatataaatatgtatacataaatttcccaaatatactcagattaatttatggagtacctataatgtcctattaatctatttgttcttctgtccttttctttgaactaactttctagtaactcctcagctagggtcctagcaggaagcaaaccgtctactcaagtggtacaacaaagaagggatgggcaagctttatggaagcaaacaaggagtagggcagtacaccagggccagtgacagggggagctgtccctagggtgtgctgaaggtggctcacactagctggcaggagccagttgttagcaacacgcaacttcacgttagtagcttgaaatcagccatggtgggaatacttacaccaaggaaatgggcaaatgctgtacatcagaggttcatgcccccctttttttcagagcttgccattcagcagttactagcacacctctgggaggaagcgttttctggaatctggggagcagagttctatggagagggctgtctgccagggactgtggtcttcagtaggaaacaggcaattcattgtaaccccccagggaaggagctggggaggaaacattctgacttgatcttctgcccccctattccttacagtacctcccactgcccaaatccaaccaggtataagaggacgagagagctggggacgcagtcacaggggccagctttggggcagggtagagaagggcagagacagatagaaacgtccagcccaagatcattttccaccccacccaagtcttcattttaaaaaatttcttcgtgatttttatccacatccagaaaaaaacctcactgaggtaaggattggaattttatacaattgaaaaattaatttgggaaagatcgaaattttatgaaactcaaaatttcacaaatttcaaacgatataaaattttaaaaatctaatgtctttttcaaatttgaaatttgaaagtacatgtctttccacatattccttttatttaggcttttgttttttattctctaattaaatcttacaatcatttccatatgggtcttgtaattttcttgttaaattcctttgtattttatagttttgatcactgttataaatgaaatatttttctgtgttcatgcctaactgactagtcctaataaaaagaaagttactggtgtcttcatatttagtacatattcaagcaatctataaattgccatttacaaagatcaaaaactcatgtgaatactattttgtaagtaggttcttttgaattttctatgtttacaattatatcatctgcaaaaaagaataattttgaatatttatactacttattttatttccttatataatcgtattagctacaaactttgaaaggacagtgtagacgatagccatcctgtcttatttcttattttattgggcctgattcatgtttcacagtaaaatactaggttggtgcaaaagtaattgtgatcttttccattaaaagtaatgacaagaactgcaattacttttgcaccaatctaatagtatgtctacggttagcttgtactacatatttttattttattcatgtaccttctttctagaaacagctgtagaattttatcaaacgctgctccagcatttttcaaatataaaatctggcttttctcacttactttgctgacgtaatgaattctgccagctttttaaatgatgagccattcttgcctccctgaaacacatgttatttgctcataatatattattcttttaatatgccgctgaattatattcgctgacactttattgagatttttagcatctttattcataagtgaacatgatctttattcataagtgaacaattagttttcctaattgtattaggaatgacaaaccttagcattaaggttgttctttgttttggataaatgatttgaggaactttgcatcaagttttgtagactgaagcactttaaataatattttggtaaattttgtttgtcagtttgtttgttgttattgttttgttttggagacagagccttgctctgctgcccaggctggagttcagtgatgtgagcataattcatggcagcctaaaactcccgagctcaagcaatccttcccgctcagcctcccaagtagctaggactacaggcacacatctgtgcccagtttatttattttggttgtttgttttatggagacagagcccccttatattgctcaggctggtctcaaactcctggcctcaaacaatcctcctgcctcggcctcccaaagtgctgggattataggcacgagccatcatgcccagcccatcttggtaaacgtttaataatgtttcgctccttcttctggttagctgtctttttctatttctcacctcttcttgagtcaattttgaccgtttatgttttgcttaaagatcgcttatattccctacattttccatggtttgctttgaagttccgcaacttttttcttataattatgttactcctttctatatttgtaattatatatcctctctcatactgacgcacatgatttcctttatttttcctcacaagggatttatctaggtcattttccccctgcaaagaaccgactttggttttttactcccagcgtttggctttttgcttcccgtatggcaagttaggaagggaatttggagtcaaatgtcagttctgctgctcaccagccagggacatcggcaaatcatttactgaccttggtgagcctccagttcttatctgtgaataagaacatgcctcactcccagggtagtgatgtagtaaaaaataagaaaaagcctataaagcacccagcacaactcctgacacacattaagacctcagtggtgttagtggtattactcagggctctccagaggaacagaaccaataggagttataaatataggctcatgtgattataaagcctggcaagtccccagatctgcaaattgagttacaagctgcaggcccaagaggagagagccaatggtgtagttccagtccaaaggccggcaggctcatgatccaggaggagccgacacttcagttcaagtccaaaggcaggaaaaagccaatgtccaagttcaaacgcagtcaggcgtgaggaattctctcttatttcagagagagtcagccttttttattctattgagaccctccactgattggatggggcctacccacattagggagggccatctgctttgctcagtctacagatttaaatgtaacttcattcaaaacttcctcacagaaacacccagaataatgtttgatcaaatatctaggcacccctggcccagtcaagttggcacgtaaaatgagccattacaatattcaccacacacgtcacccagcccagactctttgcccccacaggcacatgtgcctctctacctgagcatcgcacatgctttatttattttatttgtattcaatttgtcttatgttattatatttgctagtttgttgttagtcttctcccctataaatgccctagtggaagcacatggcttgggataagaaactgagagatggcccaaaactcctccagctgatgaacaacttcagcaaagttgaaggatacaaaataaatgtacaaaaatcactagcattcttatacaccaacaacagctaaactgagagccaaatcaggagggcaatcccattcacaaaagccacaaaaagaataaaatacttgtgaatacagctaaccaggaaggtgagagagctctataataagaaggataaaacactactcaaagaaattaaagaagacatatagatgcatagatggaaaaacatctatgttcatggataggaagaatcaatatcattaaaatggctatactgccgaaagtgatttacagattcagtgctattcctatcaaactaccaatgacattcttcacagaactagaaaaaactattttaaaattcatatggaaccaaaaaagagcctgaatagccaaggcaatcctaagcaaaaagaacaaaactggaggcatcatgtgatttcaaactatactacagggctacagtaaataaaacagcatggcactggtacaaaaacagatacatagaccaatggaacagaatagagtccagaaataaggcttcacaaagctggtaaaaacaaacaatgtggagaagactccctattcaataaatggtgctgggtaactggctagccatatacagaagattgaagctggaccccttctttacaccacacgcaaaaatcaactcaagatggattaaagacttaaatgtaaaacccaaaactataaaaaaccctggaagaaaccaaggcaataccatcctggacataggaatgggtgaagatttcataacaaagataccaaaagcaatcacaacaaaagcaaaaattgacaggtgggatctaattaaacttaagagcctctgcatagcaaagaaattatcaacaggataaacagacaacctacagaatgagagaaaatatttgcaaattatgcatctgacaaagttctaatatacagcatctacaaggaacttaaatttacaagagaaaaacaaacaaccccattaaaaagtgggcaaaggacatgaacagacatttctcaaaagaagacatacaggtggccgacaagcatatgaaaaaaagctcaacatctctgatcattagaaaaatgcaaatcaaaactacaatgagataccatctcacaccagtcagaatggctattattaaaaaagcaaaaaataacagacactggcgagtttgcagagaaaagggaacacttgtacactgttggtaggagtgtaaattagttcaacccttgtgtaaaacagtatggcaattcctcaaagagctaaaagtagaactaccattcaatccagcaatcccactattgggtatatacccagaggaatataaagcattctaccataaagacacagcacgtgaatgttcattgcagcactgttcacaatagtgaagacatgaaatcaacctaaatgctcatcaatgacagactggataaaggaaatgtggtacagatatgccatgaaatactctgcagccataaaaaataacaagattgtatctttggtggaaatatagatggtgctggaggctattatccttagcaaactaatgcaggaacagaaaaccaaataccacatgttctcactcataagtgggagctaaatggtaagaaattatgcacacagagaaggaaacaacagacactgggatctacttggggggggaagatgggaggagggacaggagcagaaaagaaactattgggtactgggcttaataccttggtgttgaaataatatgtacaacaaacccccgtgacatgtgttcacctatgtgacaagcacatgtacccccgaacataaaagttaaaaaaaagaaactgggagaagaattttaaatttatatgtaactcatacacatccatgagcccctgtatttaacaatcaatgtttcatttaaagaagcataacccaagcagacatatcaatcttccctcataactctaacaaatatcagatgtgggcaggcagtatttagccattgataacacttattatcaatttcttgtattcttctatacttcagcaccctgaaactctacctctcagttactttgtgctgttcctattaccggcgtatgtgcccctcctccactttgataaatcactcaagcagcactgtcttttctcctctttggaaagcagaagaacaaacaggagggtatattttccacctcttgatgacagtatccctcagagtaaaactaacagaggatagcagagccatgagattctgtgggcctgaaccctgcccagacgccctcctactctggctctaaggctgagcatgtgactcaggcaggtccaatcagcatagtttattcccctggccccagggagcatttcagggatggacacatgactcagccaatgcaatgagactcaatgcttggaatttgtctggatttattagggaaagaaaagctctctttccactggaggggttaggccggcaggaaataagtctggagctaccagaagcatcttcccaccacaagcctacctgagaataaagtcaatgcagaggtaaacagatcagagagatagagtgagagcaagtccttaggattaagcacctagatccagccaggcctgaagcccttacctctggatttatctgttgtatgaaccactacatatccgttttagttgagtttctatcacttataactcacagggacccaagtaactctgaagagtaacctatgaattcattgatagttgattttttgacccagagatcccctctctgtttccatagcctccaatgtttccattaccaggtccctaatcctggtatacagaaattatctcttctcttgtctgtcttctcccaaatactgcagctacttgaggccagaaacctggctttttcatttctgtgtcctctaagtctagtctagaatccagaacatacagttcctgggatcctacaatgtggtaagtcccttcttaacattaatgcttcccgcccccttaggtattggggatggtaggtattgccatcctcaagttacaggttgggaaactgaggcacatagtaaacatttcttaggaacttaataggtgacagactcctgatttgaacccaggcctctctgactttaaagcagcatttgataaacacttgttgaataaatgaataaccccacaggctgactttgacattcatcctaatgaaactttagctttagttctttcccacagatcttgacgttggggagccttcagaatttttccagaatgtactgcacgcagaacctggaacgtcttgggtagctggtccaaagctgaccaggggcctccttctcattttttcttccaggacttcaatctgcagccccatggcctgctgttctgaatagccgccccctgccctaaactctgggatgccttcctaaagcagctctcaagttttactgtgttttgggaggtcttcttcccgaatcctcagagtcttaatgctacattccccccatcaaggtcccagaagacctcagcctcttttctctgtccccactcttaacactcccctgtcccgagtcccatgctctcagctcctgttggacgtcttcctccttcaagttcctcaggacacactgaacctgcttcaatccccacctcagggtacatggcctctcacgccaaagtctgcacatgtcctgtcatccacccaaagctctcctcctcaccccaaagcccttgacccttgtaacccctactcatcatgcagacagctggccaaatacatctccacggggaattccctgggtaccccccacccggtacaccagaatcctccgttttgtctgctcttactgttctgtacttctctttaatatcccccaacacacctgtaatgacccaccttttgagtgcctgaacacctctagactgtgcacaccacgaggacaaagacatgtcgtgctggtttccagccatatcctcaccgtgccctgaacaagcctgacacacagtggaactccataaatacttactgacctactgaatgaataacataaactaatctgtgctcatatttggaggattctgatgggttgatgatcagcccctctcagattacaaattcatttgcacttctctgagcagagcccacacttcctgtttgtccaaaaatccctacgtaaccttggttctttctccactgaaaatctcatcctctccatgcctttaaaagaataataaggataataaaagcaaagataataacacatgcctgtgactgccaagcagtgtgctaagcacttagcacatttcagcccatgcaatgttcccataaaccctagaaagtgggctacggtcgttgtctccattttacagacaaggagactgaggctcagaaagattaagtcagttattcaaggacacacagccagtaagcaatggagccagacagtctaaccccagaaaaacctcatataaccactaaactatataataataacttcccaacattttttactgtgactcatagtaaaaaatactttttatatcatgacacagttcacacatatgcactcacccacaaaagactgaaacaaaagtttcatgaagcaatacttagttttattatgtgctatgcattctatttccttaaaaataaatgatggtcatgatccaaggcagttaataggctatacattccagtaggttaaaattaggtatgtaccacatttgagtttacagtactgctttttattagggtttaaatgaaaatacttatttgtatgtacagattatctgctgatgcgatgcaggcagagttaacagccccctaaagatatccgtgtcctgatccctggagcctttgaaaatgttaggttttatggcaaggaggaattaaggttgcagatggaattaaggttggtaatcagttgacctgcagatcaggagattatcctgggttatgtaggttgggctcagtgtaatcacaagggtaactggaaggatatatggaaaacggaggtagaagagaatgtcagagggaggcaacgtgaagaagactcagttggccagggctggctttgaagatggaagcaggttatgaggaggaacacaggtggactctagagactgggaaagagaaggaaatgggtccttcaccgggcttccacaaaggagcacagctccgatgacaccttgattttagtcggtgagacccaagtcagacgtctaacctacagaactgaaaaataatagtccgggtgcggtggctcgtgcctgtaatcctagcactttgggaggctgaggcgggtggattacctgaggtcaggagtttgagaccagcctggccaacatggcgaaaccccgtctctactaaaaatacaaaaattaactgggcatggtggcaggtgcctgtaatcccagctacttgggaggctgagacaggagaatcacttgaacccaggcagtggaggttgcagtgagccgagatgctgccactgcagtccagcctgggcaaaagagcaagactcgtctcaaaaaaaaaaaaaagaaaaagaaaaagaaatgtgggttgttttaagctactaaatttgtggcagtttgttacagcaacaacaggaaaataacagattcccaagaaactggtaacaatattgtctctggggagggggaatagttacttagttgagggatggagtaggatgatagagagtaaaaagagcctactgtttgaattttgaaccacttgaatgtattatttttagcataaataaaatgctttgaatatttggggcttcctttttttttttttagacgaaatctcactctgtcgcccaggctggagtgcagtggtgccatctcagctcactgcaacctccacctgctgggttcaagcaattctcctgcctcagcctcccgagtagctgggactgcaggcatgcaccaccatgccctgataatttttgtatttttattagagacagggtctcaccacgttagccaggcgggtttcaaactcctggcctcaagtgatacttctgcctcagtctcccaatgtgctgggattacaggggtgagctaccgtgcccagcctaagaagtcttataagactttttttcccttagttccacctcctcccccatgaaattttaataccacagatatactctatctcattttatgaaatgtatatctgtgttttatatataaaaagaatatgtgtgtttttatggccccaagaatcagcttttaaccccttgggggccatactccctctgcccctgccacacacacacactgagtatgcacaattggggtaaaaaaaaatcacattattttatgtctgaagtacagatatacattcagtacctaaagagatatacaaaatatttgtggattaagatttcatggtgggaggtgattaagaaaaaaaaaaaagcctaaaaaacctccttaggagagtaataaattttaaaagattatagaaggttgagaaactgtgatctaaacaggtggtttggaattgcccagtggggcccacatagaatcggaagtgtggcaaatgtcacagcagggatgggtagtgtcttagaggggcactagtgggaaacagggaccttgtctcccactggccctgaacatagcgggtaacccagaaccacactgtcactaaagccgacacctcaaagtggctcactgatatgcttatttgaaccactaaacttttttttaagaatctggaaatttcacataaaatatggacttatggctctcttgaaaaattcgaagacctaatgacactggagccacatttctgcatattaacaattaacatagccgggtatggcagcccacacctgtaatcccagcactttcagaggctgaggcagagggatcgcctgaggccaggagtttgagaccagcctggccaacatggtgaggccctatgtctaaaaaatattttaaaaattagcagggtgtggtggtgcatgcctgtggtcccagctactagggagacagaggtgagaggatcacttgagtccaggagttggaggttatagtaagccatcacaccattgcactccagcctgggtgacagagcaagactgaggaagagagagagagagataagaaagaaagaggcatatttaacttatttaccttccctctctggccccagcactggagcagagcagaaggaaggaactatgggatagaatgcaatttctttcctatccttatatctatttatcaaggagacttcaacaaacaacaataaaaactttattgaacacttgactgtgcacccggtactgtactaagaactgagtttcgttgtctagtctaactgtccccagatctctctggagtgtacataatcatcttcattttcctgatcagcaaccccagactcagaaaggtaaagtaactcgcccaaggtcacacagcagtggcacactttagttattatttctgtataaaaactacaccaaacttagtgacatgaaacaaccattccattgtcctcaagtttactatgagttggggattcagaagggacatagcggggatggcttctctgtgctctgcagtgtctgggacctcacatgagaagacttgaaggctagagatgagtcaacagcaagaatctaaaaatcactcacaaatctggcacctgaaaaaagatgactctaacactaaactcagctgggactgccaactgaccagatcacctacacacggcctccccatctggccacagcctctccatgtgcttgggcttcctcacaacatggaagcctcagggcacttcttacatgatggcttaaactccagcaagaatgttccagcaaacaaaagggaacagcactgccttttctgacctagccttggaagtcccatagttaacttctgccacattccactggttacaagcaagtcacccagattcaaaagaaggggacatagaccccaactctagacggaaggaggctccattgcagaagagcacatggaatggaagatattgttgcagccatcctgcaaaatatgatctgccacatggcagaaccaggacacaaactcaggcagatggctccggagacactgttgttaaccactaactacgttctacaggtggttatgagaattaagtgagataatacatgcaaagtgctcaggacagggaatggcacatcatatcgaattcaatacatattgctttcctgacttcatgcactctctttgcctctacacccgtgcataacctcacctatgaagtgcctggctacgtgcatctggaaacctggcatccagtgagctaactcaggagaaagactgaactcagcctaccccccaccatagctctgggtgagaatttctctgaggactccgtggaggaggccttgtctcgcccactctgtggcttggccatgtctctaaaacccaggcagggccagagagctgtgccccagccccagcagatgacccaggggactgaagttcagagttgaagagttcagaccctgcacagttcatgaatgttcctgggccccaaagagtaactggagaaattgtttgtatcagtgaggaatgacttaactcttggcaaatcctagaaaacagcctttcttcctgtttctagaggccttccaaagaaaagaaacagtttagattttgctcagctctgtggttgactacggactcccaccccatgggggacccatgggtgaggtcccagctcccaggagcaggggagggagcattctgggagtgcaaaccaaactatttggttctctggccaatggggcctctaagttggcttcagagaccactgagggatgggagtgtcatcaacacagatcccagaatctctcctctaagctttaccttccattcaagccgggctgggatcctcactaccccaattcgcctcaccccattccctcccaccgcctgccctttgcgagtgttgagccgccctcctggaacaccttccttcccatggccaagcaaactcatctgcattttcaatacccaggtggagctctacctcaaccatgagaaatcttccccgaaaaccatggctcaacaacagttttatttctctccctgaacttgcaacgcaatttacttcttcattcatgaatgcaataggtcatttttagggaaggcgttctcaaggcctttggcctcattacctgcttgacgctcttaaaaattatagaagacctcaaagagtttttgtttatgtggcttttgtctgttgctttttaccataataggaatttaccctgagaaattttaaaactatttattcattcattcacgtgaaaagaacaagaacaaacccattacatgttaatatcaggaggatgacatcaccacatgtcatgaagcctctggaaaaccccactgcgcacttgtgagagatgagagtttgaaaaggcaaatcacatcttttgttatatcaaaacaaaaatagctttgatctcatggattccctgaagggccccacagattattttgagaattactgtctaaggctatttagaggcaccaggttttctctgtctctctctcatctctatctctttctctcccttttttgataacttactatctctgtctctatctcaatctttgtctgtctccacgtaagccttcttctctttcatccatcactgactttttggtataactttagtatttactttactggtacttgttaacattttaaaaaattaaatagataaggataggaaaggaaaagaaattaggaggtcaaggcaggaggtcttgagcccaggagttcaagaccagtctgggcaacacagtaagaccctgtctctacaaaacagaaaacaaaaatttggcgaggcaaggcggtggcgtgtgcctgtagtgccagctactccggaggctgaggtgggagcatcgcttgagcctggtaggtcgaggttgcagtgagccacgattgtaccactgcactccagcctaggccaaagattgaaaccccatctctaaaaaacacaaagaaaaaaagagagaaaaggaaaggaaaaatcagcgtgcaaagcacagactcttagtaaagactgtgcatatcaccataaatatttttgttatacattgttccagatacagagaaggatgtagatataggtgtagatataaatatgaatgtgaatgtgggtatgtatttgttattataggctgtggtcagaagattttgaaaacagtataatagaagaccttttatggagatttctcaggataagacaatgtttagcaaaatgtggggcattctctcctagtggtatgggaaacaatgttttggttgcatactgcatatgcatatgatattaaacaacaatagtatattaacatcaacattaaataacattaataatccctgttcagttgtcttttagctactctgattacaacgaggaggaagtctcacttggtgaatagggtctctttaacattctctaatatttgctaatctcccttggtaatcgggacagacaaagcctgaagttcagagctctcagcagtcagcaacgtctcagtgggctccaaaacactgttttggattcaaatatatatatatatatatatatatatatatatatatatatatatatatagagagagagagagagagagagagagagagagagaggatttatatatatatatagtatatatatttatatctatgagtatatatataaatccaatacatatgatatccaaattcatatatattagatttaggtatcatatatatttgatatgtatactcatatatgaattcaaatatatatttgatatgtaaatccaaatgtatgtacacatattaaaaaccctgttttggattcatatatatatacatatatatttttcttaagtatcatatatacttaagtattatatatacatatttatgaatatatatatatatatgaatccaaaacagggtttttttatgtgtctatatatataatatatatttatgggttcatatatatcatatatatgaataagaatatggattataagaatatgaaataagaatatggattcatatatatgaatcaatatatatttatacatatgtacatatataaaatgttacagttgctatttacgtgtggcaatgatgctacgtttccatcatcttaagtagagatgtaacatttcttatttaagtaagtttattgcaataatcaaatgagttgctgtaaagaaatacttaagaaaataatatcacaggtggtgtgtatatctggcaaaaagtgtgagatgaaggtagttcccaaggggttaagttccagaaatactcatgttctggaatgaacactcaatggagtcaggcaaatgtggattcaaattggccgctctgccacccactgtctgtgaccttgggcaagtgactcagccagtgttgaggactcactgctcctttgggctctgagagttttcaaggatcaaagacatctgaggtaacaccagatgacctcaggagaaagaccccaataactctgtcccatactctctgctaaataaacactttgtgggcatgatctcatggctcactacaatcttgaaataaggaccttttttttttcttctacagatgaggaaagaaaggctgagagaaagggcaatgaccttgtcttcctcttaataaatgtcaacttctttttttttttgagatagggtctcactttccgtatttggaaagtgcaggagcagggatttgaacccaagtccatctgggtgtgaatctattttgtttctggctgcatttacccatcttcatggggacaggaagggaaggagtggccactcagacaccactcccatcatctcacctcctctttgtacctcctctactgatgctactaagcatggtaggaaaagttgagattgttttaagtactcatgttttagccataatttacttttactagctttgtaattaacacatgggaaaaaagcaggtttcccctgctaagtccaagagactaggaagatcaatgaagtcattgtcattgagttaaatattaagaggctgatttgtaaattcaaactcaagtttgcattttaaaaatataccgttgaattaaattttatgaggacaagttgtagaatatgcataatttttttctgatagaaaaaatccatctacccagcttatatttatattttagttttcaaagtctgacttgtaaacactcaacagttttcacccatatttcgataatcaaatgtaatggttggcacagggctttgtagtttgaaatacttgggtcaacaattctacatttctttctcttaacatgctattaaaatgcatggcttctgatcacaaatttactttcattcaagactgaattgaacaatttcagaatcataattttaactgttcccaactgatcaatggtcttagtttcaatttcaaattcccccagggaacgatcgtcgctgggcatagcttttatgcggggtcatcttatgggggaggagcattcaggcagaggggacaggaaggatgaggatctagagataagagtgaccctccttaagtgtctgaggggcagcaaggagggagcagaacaagatgagttcagggaggtgatgggagtagggaaagaaagatcatttgaggctcgttctccattgtcaggactttggatttttattctgaataacaccagaagcagttggggggttctgggcaaagaaacagcatgttctttctcaccttgaataggatccctcagaaagctgagttgaaaatggatgatagtgggggaagagtgaggactgtatccgataagccatgtgagcgattatgctggctcgggtcagggtgggggtcctgggagtggtaagaaggccaggattggatggtggattaaagtgatgtgagtgtggggaaaagggaggagccaagaatgatggcaaagtgtttagtctgagtcactgaaagagttggcttttattaagaggaagaccaagggaggagtgtgtgtgtgcgcactcatgcatgtgtgagtatgcgtgtgtgtgagtgtgaaagtgtgtgtttatgtgagtgtgagtatgagtatgtgtgagtgagtgtgtgtgtgtgtgtgaccatgagttaacttgggctgtgtggagtttgaaatgaccatttggacacccaatgggagatgttaactagatgacagggacacagcccggaatgcagggaaagtaaaccctgagagccgttgtagtagaaattatatccaaagttccagaagtgattgctgaatggctaaaggttgctgagggaaggaaaacttttcactaaaaggcaatttgaacattaacatgttattgcttctcaagaaattaaaagaggccgggcgcagtggctcatgcctgtaaccccaacagtttgggaggccgaggcaggcggatcacttgaggtaaggagttcgagacaagcctgggcaacatggaaaaaccccggctctacaaaaaatacagaaattagctgggtgggtggggtgcggcacgctcctgtaatcccagctactcagaaggctgaagcagaatagcttggacccaggaggcagagtttgccgtgagccaagattgtgccactgcactctagcctgggcaacagagcgacactctgtctcaaaagaaaaaaaagaagaagaaagaaaggaattaaaggggtcttctcaggccaggcaaagacaaagtggagcccaggggatatcgccccactccactgggaccctagcctgagagcagggattgtacacaggcatctaaactagggcaaaacacctggtctggttacaaaattacacccaatatgtctttcagaactgtaacccaggcacaagcctctgcctcttctttaaagtattttcccctgactctgcctgcttcctgcttttatgctcctctctacctctttgttgcagggggccccagtcaaaagagctcacctcacctctcctgatagattgcttaatgagtacacatccctcccatccagtaagcacgcccctttgcgaggtaaccctgaagctcctcccctccagaggtgggttctatttccccagccttttgattctgggcttgatcttctgacttgatttaaccaatattatgtagtagaaatgccagtgtgtgagttccagagcttgagtcttaagaggtttgaagcttctgctttcaccttcttggaaactccagactaccatagaaggcagctggtgcagcctcctggggaatgagacattctgtggaggagagtggaagcaatccctagtcaacaaccagccagacatgagggagaggctattagggccttttcagccccagccagtctcccaactttgtgcagctacatgagtgagcctcagcaaaaccagcagagaaactgcccagccaacctttagaatcatgagaaagaagaaatcattgttttgtgatttgtacacaatgacagataacgaatatacctttcttagcctcatgctcctcatctgtgaaatgggaatagcagtccccatctagtagagttattttgcacactaaccaattgactagatgtgaacatacttgcaagctataaaaaaattacatgtgtttattgttaataggcctcaatatattgagtaaaatatctgggcccctggaaaggtgatctaacagtattttggcacagttaacacaaatagagtgcttaggcacagaccaggcactgttctaagttccgtaattgtgctaattcatttaacactcatcatggctgggagcggttgttcatacccgcaatcccaacactttgggaggccaaggcaggaggatcacttgaggccgggagttcaagaccagcctaggaaacaaagcaagactctgcctctatgaaaaataaaatgtgagccagccatgatggtaggcatctgtaatctcagtctgtcaggaagctgagttgggaggatcgcttgaacccaggagttcaaggctgcagtgagctaaaataagcctgactgataaagcaagacaatgtctctgaaaaaaaagaaaaaagaaaagaaacccacttaccataagcaagtctacaaggttggaaccatgttttacaggtgaggaaactgagtcctagagaggttaagaacttttcaaatgtcattcagctaagaaatgatggagctgggatccaagcccaggtgacctggctcctgagcccttgttcccatgagataatggcaggcagacacggccaggtgcggtggctcacacctgtaatcccaatactttgggaggccaaggtgggttgatcatttgaggtcaggagttcgagaccagcctggccaacatggtgag[140 bp omitted]cactccagcccaggcgacagagtgagactccatttcagaaaaaaaaaaaaaaaaaaaagacaggcacatccaaacagacaccttggacagctggacactgcgggaaaagctgcaccctgctttaatgtgagagagagtttccatgtggttgttatttggtggtggctggagatggaaccaaggtcagttgtctctggaaggttggctgcctcagatattgacttctgtccttcctgtgctccattacctttcccttctgttcaactggggatcaggctttgtgggccgttgtttctggagacttttgtgtcagggcttcccggcttctatttcccaaagccatagtcatttgcagaagactgaggttttcctacactgagaagaaatttccctgaattgggtaaagagcagtgagttctgtgggttctggagccctgaagcaggcagggctgggggatgcggttgttactccctgttctctggcaggatatattagggctcattgcaggctgcaccccaccaccttgccctagtaactttagtttcttgtctcagccacggtttcctgtcccaggcacggaaggggacatcagagctaccgcatctgaaggggccctgtggactgggacaatgggcttctcctgggtcaccagtgagtaccattgactggtactgcctaaaactgcagaactgaaaatcttggtacagcccaaaagtaggggcccaatgagccccaaccatgacagtggttcagggctcagactagtaagaaggtagatttagtagagcatttccaaatttcaattgtttgcaaactccctgcaagtagagttgccagataaatgcaaaatacccagctgttcagcctgtcttttctcctgaccacccccacctttccagtattttggacattcttatactaaacaattatttgttgtttatctacaattcagatttaacagggtgtcttgtattttttatttgctaagtctggcagccctagcttcaagatttttaccataaccacacactacctcatatacttgagactttatgagaacaaaccaactgttctaacatttagttcatattttctttaaatccatatgactttttcatttaggtaaagttatttttaaggaaatttgattccactaataaaaatggaaaactggtattaattgccttaaacagaagtaaccgtaaaaatgatatttgatgagagccaagcaatgttttgaagctctagctgtgttcttttgtctccctgaggcccaccctctctcttacaaaaagatgggggtgttagagagatgctaaagagaggctagcagtctagggagactttttctttgaaggactgaaggaggatggaaggggaaagaatttctgtccatgtgagtcaatgctatacaacctcaggtccatgtactgctctcacctaaaatcttttttactttttgttttttaatttttaatatagaaacagggtcttgctgtcctgcccaggctggtcttgaactcctggacttaagtgatcctcctaccttggcctctaaaatcattttagcatcctatgctttaggacaccctgatttacagaacattaaggaatgtggaatttgttgctcacctcagtttccgactggagattggtatcaaagttcaaaattgataaaaagaaatatctgcaccagactttgctctgggcatcttacccacatgaccctacttatttctcctgacaaactaagcaaaaaagtcctaccatttcccccacccttttttttttaatgcagcaatagagacatcacttcccatcaggaacgcaatctgtgttctcaagaacttcgcttatgttgatctctctgtacatacctacaactcctcccaagctccagagatacaggttaagaaggaagcatccaaaaaaccctttggggccgtcttgcccatctgtcctcctgaaccttcatgctgcagccctgctcccaggttatacttgggaaactcaaataacctaatttcaaggcaataaaagtttccaaatttcccagaggacagaagattttgccctgagtgtttcccacaatttgtaataacttttcctttgaatcgccccgaattcttctctgtcctaacaagttagtaagatctggcttgaagtgctggtccatgttctgccttttgatctgccttctgcttagaaggatgtgttacctgaaagacaatttattaagctgtacccttatgatctgggtaccattctgtatatttcaacaaagagttttaaaaattagaaaatataactcttgggtttatacctaaaagggttgaaaggaaagattccagcagatattggtatacccatgttactacagcattacttacaagagccaaaagatggaaacaaccaaaagggctatggaccactgaatggatgtttaaaatgcagtacacacagacactagaatattcttgagccttactaaggaaccaaattctggtacatgctacattatagctgaaacttgaagatattctgttaagccagacacaaaaagacaaatattgtgtgattgcacttacatggggtacatagaatagtcaaattcatagagacagaaagtagggtggcagttaccaggggctggggaagaggaaaatgaggagttattacttaataattatggagtttcagtttgggaagatgaaaaagttctgaagatggatagtagtgatggctgtacaacaatgtgggtatacttaatactgctgaattctacatcgaaaaattattaaaatggcaattatatatatatatatatatatatattttttttttttctgatacagagtcttgttctgtcatccagtctagagtgatctcaatctcgaagtggcacgatctcagctactgcaacctccctctcccaggttcaagcaattctctcacctcagcctcctgagtagctgggattacaggcatgcgccacaaagccgggttaatttttgtatttttagtagagattgggtttcaccatgttggccaggctggtctcgaactcctggcttcaagtgatctgcccacctcggcttcccaaaatgctgggattacaggcgtaagccaccacacctggcctattatgtatattttaccataataaaaaattctaaaaacaacaacaacacaaaaaagagctggctgatctctcagaagggctgggtttcagtgtctggtaaacaccattcaaaacagagatgttctgattttgatcgcggtttttaaaatattcaatcaattaactttttaatttagagtttattagtagaactactttagaacaactccccatccttcagaaaaaaaaaagtacatctttaatctatttgcttaaacatatacatatttctttctagtcttgtttaaccattagcagtgttatgttattgttatgggggtagagggatacgatatacttacagttttggagtttgcttttttacgcttcacaaaatattgcatgtaccaagggtcagcaaacttttcctgtggagggccaaataggaaatatttgaggctttgcaggctgtatggtttctgtggcactgcttgtctgtcactgtagcacaacagcatccagagatggtacattaatgaatgggtgtggctgtggacaaaggaaaattcttacaaaaacaggtggcccagggtcacagtttgcaggcctctggtatcctatacccatatgcaatatagctctgtgatgaggggctgagggcttagtatcaggggagcctgggttccaattttggacattctagccctagttgtagggtctatttgtgcaaattgtagaacatctttctgcctcagttccctcatctgtataataggactaataataaccagatcccagtgttgggattagatgagctaaggtgtgtaaaaaacatggccagatcctgtgcacggcagaatctgtaaaaacagtggatgctacgttacttgctatcatgagccaagtttcttgtttgtctttcatccttctgtgtgttagtccattgagtaaatacactttaatctgcttcattatttctcccagactgtctactttaaatcattcaacacccttgaagcaccgaggatgaagaaaagaagctgattttcatttttggactgtctgagtaaatgtgtttggggaggggagggtgtttaaagacataatcaacagtgaaatacttgcttgggaagaatttttctcccctcccccaaccaagaaggctactcaaagatatgaatgtatttcagaattctttgagagctgggctggattaggtaggctcttcactgaaggtaagagaaacttaaaattgcaatggggcacctctaaacaaaacaaagggatttgttacagggaagtcaagggtgttttatggaatgtaaaatccaaaaatgcagcccagcctcagcaggtacaggataatgaatgaaaagtgattgggatcacgtgaggtcaggagttcaagaccagcctggccaacacggtgaaaccccgtctctgcaaaaatacaaaaattagtcgggcatgatggcgggtgcctgtaatcccagctactcaggaggctaagtgggggaatcacttgaacccaggaggcagagattgcagtgagccgagatagcaccattgcactccagcttgggcaacagagcaagactccgtctcaaaaaaaaaaaaaaaaaaaaagtgattggggcaagaggtcaaggttccactgggccaagacaatggtatctctcattttcgtacaacagagtctctcccgtctgcaattccctgcagaaacaggttgatatagtttggctatttgtccctgcccaaatctcatgttgaattttaatccccaatgttggaggtagggcctagtaggaggcatttgggccttgggggtggatttctcatggcttggtactgtcttcgtgagagtgagttctcatgggatctggtcatttaaaagtgtcctgtacctccccccaactctttctctggctcctttgtttaccatgtgacatgccttcttcccctttgccttctgttatgattggaggcttcctgaggcctcctcagaagatgatgctgctacgcttcctgtacagactgcagaactgtgcgtcagttaaacctcttttttgcgtgtgaattgcccagtatcagatacttctttgtagcaatgcaagaaccgtctaatacacaggtacattttaatttcaccctttaaatcttgttctatgtgcagcttccttccttggatccccgccttgagacttattgtcacatggtggtggcaatcactcacctgactgagacgaggaaagaaaagcaggcatgtgtttgtgtcttaacttcccaccttggctattggccaggagataggggttttggccaggagatgcggcgattgcatcagacagaggcgggggagcccgaggaaagaggagttctccacaccttgatcaccaccgaaggctctggatccttctctctggctgatttgaccacacccaggagcagtgacatggaagtgaacttggagaggcaagttgatgagaccgagcgtggccttggtttcctgctttcccctgctattcctggttcctgtgctgtaaggatgccacctgacagttcccatggcttcagaaggtgggactcagaaggtggctaaattgaaatctagtactctctagcatggggcctgcattaatccgttctcacacgactataaagaaatacctggctgggcgcggtggttcatgcctgtaatcccagcactttgggaggccgaggagggtggatcacgaggtcaggagatcgagaccatcctggttaacacggtgaaaccccgtctctactaaaaatacaaaaaattagccgggtgcggtggtgggtacctgtagtcccagctactcgggaggctgaggcaggagaatggtgtgaacccgggaggcaaagtttgcagtgagccgagatcgcgccactgcactccagcctgggtgacagagcgagactccatctcaaaaaaaaaaaaaaaaaagaaaagaaatacctgagactgagtaatatataaagaaaaggggtttaattggctcacagttctgcaggttatagaggaagcatgaggctggcatctgctcggcttctggggaggcctcaggaagcttacagtgatggtagaaggtgaagggaaagcaggcatgtcttacatggctggagcaggagagaaagaggaggtgctacacagttttaaacaaccagatctcacgagaactcactcactatcatgagaacagcaccaagagggaaatccaggcttgtgatccaatcacctcctaccaggccccaccttcaacattggggattacaattttacatgagatttgggtgggacacagattcaaaccatatcagggcctgtggtggtgagggcagcatgaccctttgcagaacctgtggtggaagatagactgcccaggccagaggctggtggagggtgtggcagccacttgggggaagagggttggctcaaagagtcccaaagctaaggagagagggagccagtggtcaagttctggctgagctgaagagcagaagtccagttagccatcagcttccaccacagaggtgagcagcaacttgaggatccatgatagcaggacaagctgcaggtgcaaagacatcttgccttcaggccacccaggtcacccgagctcaaccacccccaaacccacggaggtcattttggcagagcggacacagaaataggagacccaattgacccacaggctgagcatcacctggaagaactatttgaatcactagattagactcttttttttttttagacggagtctcgctctgtcacccaggctggagtgcagtggcacaatctcagctcactgcaagctccacctcccgggttcacaccattctcctgcctcagcctcccgagtagctgggactacaggcgcccgccaccacggccggctaatgttttgtatttttagtagagctggggtttcaccgtattagccaggctggtctcaatctcctgacctcgtgattcacccacctcggcctcccaaaatgctgggattacaggcgtgagcctccgcacccggccagactcatttttaaagatagtttttaaaaaaaattctttaacgtaatagtgaaagggtcagtacgtttttccataaagggccaaactgtcaatgttatatgttttccagactatagggtttctgttgtgaaaactcagttgtgctgctatggtgcaaacacagccacagacatttgtaaacaaatgtgtatgttctaataagactttattggcagtgaaatttgaatttcgtattatgtttatgcatcatgaaatgtctttttatttttttcaaccatttcaaaatgtaaaaaccattgttagctcgtgggttgtacaaacatgggctacaggctggatttggccaatgaactgcagtttgctggcccctaaaatatttgattcatataaaaattatgtcagatatgttataaatcacaataataaatcaaaaacctgtgaacccagcacccaacttaaactcccaaatattaataccactgactccatcctctctctcccatcactctgcctcccccaccaccctgccccaaggggaccatgattctcaattttgtgctttcagttcagctttttcttttatagttttgtcaaatacatatgcatccctaagcaatattcggtaaaattttgcttctgtgggggctttgtaaaaatgatatcatattgtacacagtttaaagagacaggtgctttttaaactcagcatcatatttctaagatttttccatgttgtttcatgcagctgtggttcattaattctcactagacaaagtttttgaggtgagtccacaggtacgctgcctctgagggtactgctgatgggaacaagctttctgaacaggattggaagccacacgccactcccccagcaccacccgccctgccttgccaccactgctggtgctgttgatggtgccgctgtcatactgacagaagcatcgccaggagctggagaaatggcttctcctttcttgcaccttccattatcccactaatgtctcccattggtagaacctaccaaatgtcagtgcacaggtatctaggaaatgtggttagcagctttccaaaagccctagcagtaaagaagagttgagtgtgggtaagtagagctgagagccaacctacattatccagctcactcactgatgtcattcccaggaattcttttttttttttttcgagacggagtctcgctctgtcgcctgggctggagtgcagtggcgcaatcttggctcactgcaagctccgccttccgggttcacgccattctcctgcctcagcctcctgagtagctgggactacaggtgcccgccaccacgcccggctaattttttctatttttagtagagatggggtttcaccgtgttagccaggatggtcttgacccctgacctcatgatccgcccgcctcagcctcctaaagtgctgggattacgggcgtgatccacggcacctggccattcccaggaattcttgaaggctgttgtttatttcatgcttagggaacattgcaactctttgattggaagagttatgtcgctgaatgccatgaaatagcatgaacattaagtggaaacagtagggaaaggtggctatatgcctctttgtctttcctaatacagaaaatgaaaggagcaaatcctggctcttccctcattgggccatggagaaatggtggggctgattggaaggttacagctgtgaagtctccagtttttcactttgaaagaacatagccctgtctgccagcaaatgtttaccaagcacttagatatctgatgcagagaaaacagtaatgcttgaaaagtcaaagatctggtccataccttcaaggagattacaatctaattgaagagataagatattcactcatggaacaaacagagaacaaggaattcagtggtaatagacaccaaagatggtgagcatgtggcacacataccataactctccattcccagacccatagcaggcattactaatcaatcagatcttttttctttcttgatgaatctggattcaatcacagaattctttaacacagtgattcagacatttactcttaatttctcaaaattgatagatgtagcccactatatataggttcagtaattttcgttaactaattggtctaatcaatgaaaattactaacagcctactatgcaccattcgcagacataggcacagtggtaattaccacaggaagacttgtgcttgtggctcagagtgtaggcagagaatcaaagaagcaaacagaaaatgacagtgcagtggtttaagtgctaatatgtggaaaacagagggttctgtgaatgcacagaggagggacccaacccagatttgggaatcagggaggactctaggctgatacctgaaggataaacaaaagttaacgaaataaaagggaaagtgtattcttcaggaagcgttcagttgcaattgacagaaacctagctcaagttgctttaaacaaacagagaaatacacatgtgttcatgtaactgaaatacattggctcacgtaactggaaagtcccagagttgtttgcttcaggaatggctggatctaggcgcttgagtgatgtcattaggaatccatctctatctcttgagtctgcatgcctctctgcagcttcatttcaatcagggtacacattcatggtggcaaagacattcatggtggcaaagacattcctgtgcagttccaggctgacatcctgtctgcttaaaacctccatagaaaggcacctcacaatagtgccagcaaaagtcctgaggttgactctgctttgcccaggcttgattctgttcgaccccatagcttggtcatacccacccacagtatgcggatagagcagactcccaaggagactgaggtgcttttaccaggaaaagagggaactatgccaggccaggaaaagggagatgaaaaaacttgatctctgcttggaagaaggaagcaaaggagggtaccaggcagagaagctgtgatgcatccgaggagaagttcaggatgcgatgtgcagcatctgagtgtggagtagagggatgaatctggaaggcggcaggaggcaggtcagatgaggcctcttaaccacgttagggatcagcctttatcccaagcacagtgagaagccatttcagggctttaagaaggagactgaagattctaaatcgccctcacttttgatgagttaacagcattatgggaagtggggagagaaggaagaggcattaattttcaagatcagtccttaaagtaaccccgtcaaagcaaaccatgtaatttagcaaatcacagtttccattgaaacttgttcaggtaatacgtgctcctccaattagtataacagcccagagatgcttttccaggacaagatggcctttgggtcatcatgttctttgctgcaattcactcaagtgatttcattccttagttgaaagaagtggctgcttgtaccaagggtcactgaacaccagtggctacaattttttgaaataggcttcttgtagcacctactgaccaacagcctcaagcctgaggctttgagagaatgagcagagttaacccttcagcagcctcagccctcacccagcaggaaggccacagctgtcctccagtgcaggacaaatcctgccctggaaaaaaaccatacagggcaagcctcagttccgctcataaatcaatgtctgcaagtctgtttctacgtgtagttaagttacacggaaaagtacaactggatttgtccccggttttcccattagggataatataaagtggaggcggaagttaattgagttcagagttcgccgtgtgatgtcagggaagcggggctctggcaagcaggtcgtgtgtaacatgtgttctgagggtagtgttttcacacaacctccctgggggagaaaagcgttctttcaccaggagtgcgatcttcagaaaacaggcttctggggttccaaaggggctttcacctacattacaggataaaggtctcattttccttacagagacgttcgtgcaatgagcatgcctgtgatattcaagaaagggtaataaaaacccctgcctttcaacaagagtcataaaggtcggtggttcagaatagagaccctggagccagactgccagatcagtcagtcacaagtagggagacagggcaaggatcacttcactctctgggcctcgattttctaatctgtgaaatggagcattcaattagagcctctacctcataaattcactgtgaggattaaatacgttaatatatatcaagtgctataaacagtgcctggctttcagaaattaccacctatggtagggcgtggcacttagttctttacaggcattatttcattgcataatttaaaaaataaagaaaaatgttgtgagttggcgaagattgatttaccataaggctgctgaaatttaagtgtcagggtcttcactttcactgcctcttccaaagctctggaagggccccagaaataagctcacaaaggcatgtactgtaataattgcaaaagtacggtctatttcttctttttttttcaagacggagtctcgctctatctcccaggctagagtgcagtggcacagtctctgctcactgcaacctccgcctccaggttcaagcaattctcctgcctcagcctccagagtagctgggactacaggtgtgcaccaccatgcctggctaatttttgtatttttgtaaagatggtgtttcaccatgttgtccatcctggtcttgaactcctgacctcagatgatctgcccaccctggcctcccaaagtgctgggattacaagtgtgagccaccgtgtccggccagtaagacctattcctatctttattcttataagggactctaaaattgtgtaagcctcagcccccacaaaaaatggattctctctgggaagaagggcttcttatttccatcttgaagatgagaaaacaggctcagagaggcccaaagtcacatagctagagaggagtggagccgggactccagcccgagtctgtctgtctggcatccactgcactcctctgccagccttgaggtggggacaaactgagccacaggtctcagcagctggggcttgtctggccagttggccatcacaaagcgtggcttccaggaggcacaaatataaacatttttctgaatgaatgaatgaatgaatgaatgaatgattttctaccatctcctcccatatccaattcaagaattccggaacttctttcccctattgcatgcatcttagggaccacagggggttgttactgaggtgtgaccttcctctgggctgggagaggacatgggagtgacccaagctaggatgacctggggcttcctctgtggaatttgagctcagagtgaccaaaagactgaaacacaggtgagctcattccttggtgctgcctgtttctctccctggctctacagccttcctgacaattccgtgagtcctgatgtcctacaaagtctccttttctggagatggccaagagtggggttccatgcccacaatcaaaactgcaatcaaatgacatgtggctctccctgaggcttcatcgctcactctggccacacatctgtaaaagtgatgagtcagctgttcaggggcacgtgggtgaaagggatcttaagcattctttagctcaggcaccatttgaggactctttctctcaacataccccaaccaaatggtcatccagcttctgtttaaaacctttcaagggggttcatttcagctttgaataattctcttagaatgtctcctattagacattcctcctattagatgaaaatccgtattcctccctctcactgtcctttttcttccttcatttcttccttccacctttcttccaagttttcttccctctctcctctcacttcaggaagatttcacttgtctacccaccagaggccaggcacatcctgtgccaggccatgcaactactaggatagatgttacaaagtctttgttttaaacacacctctccctgatgatgcagcgattttgtttctaaatatttacccaaaagaaatgaaaacatacatccacccaaagacttgcccatgaaatgttcatagcagcatgattcatagtagtcaaaaagtagaacaagcccgatgtccatcacctagtcaatggacaagctcaccctcactgtggcaaaggagtcccatctgatccctgggggatacattccaagaccctcagcagatgcctgaaacctcagtcagtcctgaaccctatatacactgtgttttcctatacacacctatgataaagtttaatttataaattaggcacagtaagataacaataatggataataaaatagaacaattataataatataatgttcaccatttcacatatcgaagatccatccttatcatagatcttagcaatctcggcacacgattttttttccttttcttcctaagtcaagaactttcacatttttacttaaaggaagcactttctggcttctcttctgcctatctgaattgttgtcatcactactaccccttatgctttggggccatcacgaagtaaaataagggttctttgaaaataagcacggcattactgcgacagtagatctgataaccaacacagctgctaagtgactaatgggcaggtagtgtctacagcgtggacacgttggacaaagggatgattcgcaacctggacgggaaggagcagggcggcgtgagatttctatcacactacacagagcaacgtgcaatttaaaacttagaaactgtttatttctgggattttccatttagtatttttggacctcagttgacgtcgggtaactgagactgcagataaagggggacagctgtatatccacacaatggaataccactcagccatgaaaaggaaagaacttcggatccatgcaataacatgtatgagtctcaaaagcatcctgaactgaaaaagtcaggcccacgagagtagatactgtgtgattccttttctatgaagttctagaaatgacaaacccaagctgtagtgacagaacccagaccatgatttctggggactaggaatggcagtaaggattggctgagagaagcgcaggttctttctgagctaaggtaaatgttctgtatcttaagcgtggtggtgttttcgcagatgtaggcatttgtcaaaagtcatcgaactggctgggcgtggtggcccacgcctgtaattacagcactttgggatgccgaggcaggcaggtcacctgaggccaggagtttgagaccagccgtgccattgtgctccaccctgggcaacaagagtgaaactctgtctcaaaaaaaagaaaaaaaaaacaaaggccgggcaccatggttcatgcctataatcctagcactttgggtggcgaaggcaggtgaattgcctgaggtcaggagttcaagaccagcctggtgaacatggtgaaacctcatctctactaaaaatacaaaaaaaattatccggacttggtggcacacgcctgtagtcccagctacttgggatgctgaggcaggataatgtattcaacctgggaggcggaggttgcagtgagccaagaccgtgccactgtactccagcctgagggacagagcaagactgtctcaaaacaaacaaacaaacaaacaaacaaacctcatcgaactgtaactttaaatgtgcacattttattatatgtaagattttccaaaactgcctacttcaacaagctctcagcctgattaggggcatcattcaatgatgtaataaaccccgaatattttcaaaggtaagaattttgtgggttttttttaactttgagattatcttttaattctaatgttactcaataatataaaataatttatttgacagtacaaaatattcacaagcatgtggactaagagcagttgtcacaagccactggtagaagatcagcctgtcattatcttgtatccaggacccagcagctccattcctagttctgtcttctacatgggtcccaggacacctgcatgaagatgttcattgcagcgttgtttataatcgcaaaaaactgagagtgggaggagactctgaatgtccaggagaatggaaaaagtataccattgtacgtaaatgaacattaaatggcagagaagaaggaccatgtatcaagagagacatgtctcaaaatcagtgtcaaatataaaaagcaagtttcagaaagatacgtattggataatatcatttataaagtgtttctgaaacatggaacatgtattatacattctgtacacttgcatatttaagtagcaaaattataaaaaaaaaacaggaatgggaataaggaagttaccagtataaagattacattatgggacagtgctgtgattaggagttcaggctttggaatcagacggactggtttgaatcctggcttggacttaacttctctgagcttttgtttccttacatgaaaaatgggaccaataatggtatcaacctcataaggcttttgtgaggattaaaggaaataatatgtataaaaccctgcactccgcagtgtatttataagatttagatgtacaggaggtataaagaggtgacaataaaaccaccaatctcagggctgtcttaaattaagatttttttctaattaaaaaattaattttggaattatgctcatcatagagaccgtgaaaattacagatgtatatatatatgtgtgtgtatatatatatatataaagaaagaaaagaaaattaacatgtccccaaatctccctaccctggaaaacactataacattttaatgactttccttccagtcttcttttggcaatacgcattcacacgtacttagatgagggggttcagaggagaggcgtgaatctacacatctctctgtctatctatgagaaacatctcccagcttactatttgtattctgcccttttcattaccacttggggcagactctgtaagtgtctgaagcaattccttcttcttctctaccaacataacccatttttgtttatgtattggccagaattctcctgatctcagggaagatgtatagggtagtcatgtgatctagctatggccaattaaaagtaaaaataggctgggcatggtggctcacgcctgtaatcccaacactgagaggctgaggtgggtggatcacttgaggtcagaagttcgagaccagcctggccaacatggttgaacgctgtctctaatgaaaacacaaaaattagctggcatggtggtgcatgcctgtaattgcagctacttgggaggctgaggcatgagaatgggttgaacctgggagacggaggttgcagagagctgagatctcgccactgcactccagcctgggcgacagaacaacactgcatctcaaaaataaaaattaaaaaaaaaaagcaaaataagtttgatgtggaaacttttaggaaggagttttgtatcctgataaaaagcaagactgaagttctgccccagtcctggtcgcacatatcattcttgtctttgaatgagaccatgatgccaggagctatggcagccattctatgttcatgagacaagcagcctgacgacaacggccaacacaatgaagaggatggagcagaaaaacagaagagcctgggtccttgatgaccctgttgaggggccagaccagccctgaggccactaaccttcagacttcttataaatgaacataaatagcctcatgcttgaaggcaccaatggtctgactttccattaccttgaggccaaaagtattgcaaatgcagacttattgtagaattcttggaaattacacaatgtttcaaagaagaaaatggacatcatccaaaatctcactacctggagataaacactattaaatattttggtatattttcttattttcttctaaccatagagaaaagtctttctttttttaaaagtgtattgcttgctatttggcttactattaaattaagtgtttctttccttgttattaaagagtctttgaaaagtttatttttaatatccattgcttggatgtattgttacaactgacacgtttggtttgacttctgtcatgaagataaaacaagaggctttctgtttgtgggtgtttgtgcattttcttttcctgcttcctttgtttccagcttttgctatgtggatttttcactgtgcctgaaaaagttcccttcctctagcattgtggaaggtaattcactcttcacaggactctggatttcagatttatagtttgaggcgcatttccttgatccttttgagaatcacacattgctgagtcctgaatttcagctcttataggggcgtttcttaccatttgatgagtaaatctcacaaatgccagctgttgctagcttacaaggaatcaagtaccggaagttctttctccaaactggagtgcattcccagcacatcctatggggtccaaatctccccatttcataatctttgtcagggagaagtggtgtagagaggacaaaaggaaagaagttttctttgctagatcataaacatgctaaagggcaaaattaatacaggtgatacccttttagcaacacctaagggagtgagcgaggataatttctgtgtgctgcatctttgtgtctaaaacatcatgtgcaattgttttatttggttctctctgaacaattcttcctggacgcacaggagccagatgtggaaaggtgaggccagaggaggcataacagatcggttggcagactctggacttagccaagggttatgtctgagtgcattcagctcaagttgggagccacctggtttgatattccaaaagtattggtggctgctttgccagaattagttttgttttgttttgtttctgatccccagatggagttctgatggctaatgtgcacttttccttcagttacaaaaatttagaaattaaccttattagaataaaatgcatcaaaatatagggcctgtaaagtccaagtaatttcccctgagatcaatcttgatgcacgttatatccaaatgcagatatattaaatacccttggaggctagatgtggtggtttatgctcgaaatctcagcactttggggcctacctaggcaggaggatcacttcaacccaggagtctgagaccagcttgggcaacacagagagatcctctctccaaaaaaaaattaaaaatttgactgggcatgctggtgtagtcccagctatttgggaggctgaggcaggaggatcgcttgaacccaggagtttgaggatgcagtgagttaaggtcgtgtcactttactgcagtctgggtgacagagtgagacctcatctctaaaaaaaaaataaaatagtaaaataaaataaacatacccttggatttaagggatttggccacttatttatgcttttatttatactggaagagagaagcggcaggaaacataagtacatgggcagtggtttgggtttcaggaaagttaggatttgtgtcccacccttaccacttcctaactgtgggatcttgggcaaattacctaacctctctaagcctcagtttcttcaccttgaaaatgatatataatgctacctgttttataggttttaaactttaaggcatgatttatattgatatatatttatgtaatcaaatgcacagttcttaaatgctctgttcaacgaacttttacatttatatacacataactaaccagcacctaaataagatatagaacatttctaaggccccatctggaaagttctcccatgcttctttcagtcaatgtcccccaaccccagccaaccactatttctatcatcaaagatgagttttgcctattctagattttcacataaatgtaatcatacagattactattttgtatctggcatcttttactccacctaatttcaaccatgtgtgtgtcaatagttcattcctttgtgctgaatagcattccacttaatgggtgtaccaccattttttatccattaatctgttgatggccatttgaagttgtttctagtttgggggtattacaaataaacacaaattttaaattttgatgtatttcaatgtatttttttttttttttttttgagaaaagtctcactctgtcgcccaggctggagtgtcatggtgtgatctcgactcactgcaagctccaccttccgggttcacgccattctcctgcctcagcttcctgagtagctgggactacaggtgactgccaccacgcctggctaattttttgtatttttagtagagacggggtttcaccgtgttagctaggatggtctcgatctcctgacctcatgatccacccgcctcagcctcccaaagtgctaggattacaggcgtgagcgaccacgcccagcctcaacgtatctatttttaaaatacaattagcgcttttcatgtcctgcacaagaaattattttcccagatgtgagagtgatctggctgtgaaatctgtcacctcattgattggcagggttgattcagctgatctggctggctaggcaagtgtccccttcttccctcaccactccatgtgtgtccctcctgaagctgcacactcagtcgaagagcatggccatccctcatagaggaggaccattcttcggtcaagggtatatgagtagttgtgctcccctactaaagcctccaaacaagctctcaagaaatcattttccctcctccccaaggttttcttccagaagcattatggttacgggttttgcattaaggtctatgatgtagctggaattcagttttgtgtgtggagtgagatagagctcaaggttccatttgtttcttccatacagatgttcaattgttctggcaccacttgtcaaaaagatgttattttcctccattgaactgacttggcaatttggtaaaaaattgattgaccataaaagtgtgactctatttctggatcttctattttgtttcattaatctatttagctatccttatgccaatactatactgtcttggttaccatagttttctttacattaaatcttaaaaccagtgtaagttctccagcattcttcctccagattgtcttagttattctagagcctttgtattcccatgtaagttgtagaatcagtctctcagtttctccaaaaaggactgttgcaattttgtctctcagtttctccaaaaaggactgctgcaattttgataagaattgtgtttactctatagatcaatttaggaagaataaacaacttaacaatatagagtgttccaatccatgaatattgtatatttctctctatttaattagatcttctttaacttctttatagttttaagggtagacctctcacaaatctgttaggcttatttttagatactttatttttttatactattataaatagtattttaaatttttatttttcaattgttggttgctagtatatttttctatattgacttttatcctttaaacttgctaagttttcattttagtcttagtagctcctttatagattccataaaattttccatgtaaacaattgttacttataagaacaacagtttcccttcttcctttccaatctctatgcctttttgttcttctttttattgtcttattccattgcttagggcatctcatatgatgctgattagaagtagtaagaagggatatctttgccttgttcccagtcacagaggaaagcattcagtctttcgccacaaagtgtggtgaatgttgtaggttttccatagatagatgccctttattagactcaggagtttccttctattcctagtttgctgagagtttttatcatggatgagcgttgaatagccagatgacttttacatatattgaggtgatcatatgaattttctccttgattctgttaatgtggcaaattgcattgatttttctaatgtgaaatttacttttacattcccaagtcaatccccattagggcatgatatgttatcttttttgtatattacttgatttaatttgaaaaattttattaaggatttgcatctttatgaggaatactgttctgtaattttcttttcttgtgatatcattttctcctttgggatcaggtaatactagccccataaaatgagttgggaagtattttctcctcctctgttttctgaaagactttgtgaatcatttgtattatttcttccttaattgtttgatgaaattcacctgcgaaaccatctgggcacttttctttaaagtgcttttgactatgaatccaattttcttgtagcttggagctattaaggttttctagttttcttgtgtcatttttgttaacttgcattttacaataaatttttccatttcatataagttgtcaaatgtattaacataaagttgatcaaatatcacattaatatctgccggataattctgatgtccttgctttcatttctaatattgacaatttgtgttttctttcaagatttcttgattggtcttgcaggtttgtctctttataaacttttgattatgtccattttctcaattatttgcttactacttcatttatttctgctcttatttttaaagtttcttgtatattctttggttttattggctcctgttttattagtttcttaagttaggtgtttaaatgactgattttatcccttttataatataatttctaattcatttcaagctataaatttctctgtaaacattttttagcaaatctcagaagtatggtgttcattatcactcatttaagaatattttcaaatatctcttgttatttattatttgtctcatgactaatttaaaagtatgtttcttaattgtggaatattttggtgttgtatggatatctttttgtaattgatttgtaatttaataccttggtggtaagagaatatattctatgtaaactaatcttttgatattttttgagacttttgttttatggcccagcatagagttcatttttgtgaatgttctatgtgcacttgaaaagatatgtagtttgcagttgttgagtgtttgttctataaatgtcagttaggtcaaattggttgatgtttttgacatcatctacttccttatcgacttttttgtccagtttttctatcgattactgaatgactgtgttaaaatatctggcatgattgtggatttgtctatttctccctttcattctgtcaatttttgttccatgtatttcacagctctattgtcaggagcctactcatttgggattgttatatcttcttcacttgatctcagccaatgggctaagaagtgattgttacatcttcttgattaatttacccttttattgtgaaatattcactcaagactagagcactgtcattgtgctctttgccttgaagtatattttgtgtgatactaatattgccatatcagctttcatcatcttatgttagtatatgtcctttcctacttgtctgtctgtctttataattaaagtgtgtcttgtgaacaaattatattgaatcttgttttctgaatccagtataacaatctctaccttttaactggagtggttagttcatttacttttaatgtggttattgatatgatgggctttaaatctactaccttggtatttgttttctgttcatctcatttgttctttgttcctcctcctctacattcttttgggtaaagcacatattttttggctttctcttttatttctactattgactttaattatatttctttgtgttattttcagtgactgatccacaatatacattttaaggtatctaaatctattttctaataatattaaactattttaccttcagtataataaatttacaccataattccttttatacgtgtgtacttgtatatatgatatcaactccacaatatcttgctattttttaaatattcaatgaacttttaaaaaattatataaaataaggacatttaaaaagatattttacatttatctgaatattgaaactttctggtgctccatcatgtatcattttccctcggtctgaaaagattttcttttagtgtttcttttggctagtgcagatcttttggagatacagtatctcagcttttttttatctgaaaatgtctttatttgactttcctttttgaaacctgtttttactggaggtagaattctaggttggtagactttctttttaaatttaagcacttttaagatgatccacttttaacatttcactgacttttgttctccagtggtacagtattaggtattacttgtgttatttttctcctgtatgcaatgtgtccttttttctctagttgctttgaagatttgctctttatctttggtttttagcaatttaactctgatggacctacatgtagttttctttgtgtttattttgctgggggctcactaagcttcttaaacctttgggttaatatctttcattaatttggggagaaaaattagctattttctctttaaatatttcttctcacacattcactctctcctcaacttctggggtctctagggtctctgagtttttctctctttgtgtttcagtttagatattttttctttacgtatcttcaggttcacttatgtttaccttggctctgctcagctttcagttaagtatatctgacaaactcttcattgctgatattgtattttttaaatttctagcattttcatttgggcattggtgtgggccatgtgaagactggcaaatactatgacgttcttctcttcctcaatgatggctctggttttctccttcttgtagaaattccgtatgggcattagtggtcttgtcagttgggtggccaatttgaactcttcacagaactgtctccctttttggggcccaaggacttcctggcaaagaggataagcttacagcagtactccttcagccattgcacattggataccggggacccagtggacttgttccaccttcttggatccatagagatgccaatggtccagtctaccttcttatggatgccagccacctttaactcttccaagctgaaggacctgccagctcatactttggtgtgataccttactgtggggcatcttactacgggctggatgggtccagatgcagggcatgcttttgcttgcctggatttgagtctgcagatcttccaggccagctggttgaaccaagtagccacacactgctgccaatccttatggaagtgagtcttcaggatcatgccatccagctgagcaagatggctgcctacaaccctactccacaggagacctgctgagcagaagcaactctttttggttctttttagagtttatatgtcttaaccgtctcttcatgcatactgtccaccttttctgctgtaaccttcagcattgttgtgtgataatgctcacttctgagacattgctggatctgttttcatttaatgtgttatgttttaacttttttcccttgctttttcatatgtcatataattttcttctatatatcgacattttgtataaaagaacagtagagaaaaaaataaccaatttttgcctctagaaaagggcatgttttttcttctatccactgctggagtggaaaggggtcttagtctctctgatgttagttgaaccgtgtctgggctttattgcagtcttagcttcattcagttcaccattggttttaaatatgttgaggataggtcaggactttgggctctgagccctgttgagattctggagatcttattgtcatttcaacaatattctacactatgggagatttcgggattttgtttgtttgtttgttttttctttttttttaatttttatttatttatttatttttttttttgttagacggagtctcactctgtcacccaggctggaaggcagtggtgtcatctcggctcactgcaatctccacttcctgggttcaaacgattctcttgcctcagcctccctaatagctgggattacagacacacacaaccatgtctggctaatttttgtatttttagtagagacatggtttcaccacgttggccaggctggtctcgaactcctgacctcaaatgatccacccatctcggcctcccaaagtgctgggataacaggcttgagtcactgcgcctggccaagatttgtcttctttacagccctcataaagttttcagttgctggggagttctcttcacgttccaggacctttccagagtttctgagcctctagagctgtctctctgccatgccacccacccttaagacttggagagctacagccttacacactcactaaggtccagaatgccttaggagagtttctctaagcgctcctatccaattcttagcttcaggtggctaaattacctaatttttaaatataaaataattagtgtttaattagcttacatagaaaagggaggtttttaaagtttttcttttttattgttgatgtatatttacatgcaacaaaattcacccattttacatgtatattttcatgagttttggcgatgatttgtagtcatgtaatcactaccataattaaaaaacctttttggtcaggcgcagtggctcatgcctgtaatcccagcactttgggaggccgaggcaggcggatcatgaggtcaggagatcaagaccatcctggctaacatagtgaaaccccgtctctactaaaaacacaaaaaattagccgggcatggtggcgggtgcctgtagtcccagctactcgggaggctgaagcagaaggatggcgtgaatctaggaggcacagcttgcagtgagccaagatagtgccactgcactccagcctggacaacaaagcgagactccttctcaaaaaaaaaaaaataacaacaacaacaaaaaaacctttttatccccctaaaaagttctgtcatatcccgcctttgcattcagtccttcctgtaacctccagacccaggcacctctgatctctttgtcactatgattttatttttcctagaatttcatattcattggatcatagtatttgtcttttatgtttgtcttctttcacttagcatattgttcttgagacatatccatgcaggcgatatatctctgctattcatttttattgcgagtagtattctatggtacatttatcacaaaatgtccaaaggttgatggacattttgtgatatccataccatagaatactactcagcaataaaaatgaataccatttcagttgcttccggtttggagctcttatgaacaaggctgcaatgaacatttgaggaggagtctttgtgcggatatagtttttctttctcttggataaattcctaggagtagaatgatggggttgtatgataagtgtctgtttgactttacaagaaactgtcaaatttttccgtctatagtggctggaccactttgcagctgcctcagaattatgtgtgagctctggtagctcgatattcttgccaatacttggtattgtcagtctttttcattttagccatcctagtgtgttatctcattgtggtgttaatttgcatttccctggtgactacagacagcattattttacatccttaaaaagaattggtatgtctgtgtttcccatttttagttggtttgtcctcacgttattgatttgtaagattttttttttttttttttttgagacaggatcttgctttgtcatccaggctgagtgcagtggcatgaacttggctcactgcagcctcaacttcctcgggctcaagcaatcttctcacctcagcctcctgagtagctgggacttcaggcgactgccactaaacccagctaatttttgtattttcggtagagatagggtttcaccatgttgccgaggttggtctcaaacttcctgggctcaagcaatcctcccacctccgcctcccaaagtgctgggattacaggtgtgagccactgcacccagcctctgtaacaattcttcatatattctaaatacattttgtcatatacgttttgaaaatattgtcttccaggatacgggttaccttttcattttctttgtgattcaaagagcaaaagtttttaatttttatgaagtccatttcattaatttgttcctttctgatttgcactttttaatgagctaagtcctctttgcttaactccagatcacaaagatttttacctatgatttctcccagaagttttatcatttcagctcttacgtttagatctatgattcaccttgagttatttttatgcataatgtgtgtggttttgtttggttttgcttttgttttctcatatacatacccagatcttccagcaccatttttgaagttgctatcctttcccattgtatttccttggtacctgtgtcaaaaatccatttactacaagtgtgagcctactgttatatgctgaatagaagtggtgaaagcaaaaagcattactttgttcctaatatgtggggaaagtttttaggatatgaccataaagtgatcattttagccaaagcttatctttttttattattttactttaagttctgggatacatgtacagaatgtgcaggtttgttacataggtatatatgtgccatggtggtttgctgcacctatcaacccatcatctaggttttaagccccgcatgcattaggtatttgtcctgatgctctcctccctttacccctcaccccctgacaggccctggtgtgtgatgttaccctccctgtgtccatgtgttcccattgttcaattcccacttatgagcgagaacatgaggtgtttggttttctgttcctatgttagtttgctgagaatgatggcttccagctccacccatgaccctgcaaaggacatgaactcattttgtcaaatttcactccatttattttgaagctctgttattaggcacttacacatttatgattgtcgtatctttctattgaagtcatccttctatcattttgaaatgtgcctctttttttaacttgaaatctattttatctcatgttagtatagtcagtcctgccttcttatgcttattgtttgcatcatgtatatgttttttccatccttttatgctcaacctatttgtgtctttatttgtaaagtgcatctcttatagatagggcatcttggttcttggtttcttatctgaaaatctctgccttttaattagagcatttacttcattaccatttaatgtaattagtcatatgatttggtttcagcctgccatattattgtttgttttcaattaatctcctctcaatttttgttattctattaccttccctcgactttataaaagtatcaattaatgtattagtttgctaggactgccataacaaacgatcatggactgaggtggcttaaacagtgaaagtttattttctcataattctggaggctagaagtacaagatcaaggtgtcagcaaggctgtttttttctgaggcatctctctttggatggccgtcttctccctgtgtctttacatgctctttcttctgtacccatctgtgtccaaatttcattttcttataaggacacaagtcatatcgtgaggtactggagtttaggacttcaacaaatgaattttgaaggagggggtgggataatccagcccaaaactattggttttataattgcattttaattttgctattaacttttagctatacttctttgcatttttttagtggttgctttaggaattacaatatatatatccctagctttccatagtccacttacaattagtcttgtactacttcacataaaatgttgaaatatcatgtaaaatgtagaaatactgtataggtccacactctcccatattttatgttataattgttatacgttttcagtcaacatacattataaaccgaagagttacaatttttttaaacagtcatatgtatttttttaaaaaaaaaaaaagggaaaaagcaaaaacatagtctttcttatttatccagctatttaacatctgcagtgattttcattcttttctgaggcattaagttttcatttagtgtcatttctctttagcttcctttagtatttcttatagcacaggtctgctaaaacaaattctcttcactttcttttatctgataatatccttctcccttgaagaatattttcattggatatagaattctgggttgacaggatttttttctttcaacattttaaagatgttccgctttcttctgtcctctgtagtttctcatgaggtatcagccgttaatcaaattattgttcccttatacataatatgttgtttttttcttgttgttttcaagatgttttcttgagtccaacttcagcatgacctttgccatctttactcttcttggtgttcatggagcatcctgcgtctgtgaatttgtgtctttcataaaatttgagacatgttcagctattatttcttcaaagtttgtttttgcctcatttttgctctcctcttattctgcccatttctcccacaagatcgacttcaaagtgtcttttgaattacttgcaaggggagggctagggaaggcttatcaaagcccagattcttgggctctacctcagacttattgactcaatgtctggaactgagactcaggactctgtgctgtagtaagttccccaggtgacttttatgcaccacaagtttgagagctcctgcacaggactttatgggcttcaagagcaggaccatatcttatttatctgttggatgctcctaaattgctctgtagtacctcactccatgtcttatacgtggaaggtactcaatatgcatgtcgatatgcatgtgatatttgcattaatgcataggattgtttatcctccctacttcaaaaggcaactcttatgcgagtctttacctcatcaacaggtcttaaagttgaggtggttgtagttcacattcaagttaattaggactcctctggtttcttattatggaaatacaactcaatgacttaaacaaaactaagaaaatgtgttgacccatgcaactgaaaagtccaatgattgtaccagcctgggtcacagctgaatccagggcaccaacacaacatcctagtaccatctctcaccatctctaagctctactttcctttaggttggttttattgtcaggcaggcatcttcccactttgagataaacactgttgtcaacagttctgagctcacatggttcttacacttgtgttctcaaagtaaatagagcaacacctcctgggcagctctacccaaagccccagaaaggactcttattggcctggctttagtcatgtgtctattcttcaaccaatcactataaccagggagatgacttgctctgattagtcatctggagtcacgtggtcacccctgaggtaggagaggcagggccatgaaattgacagcccctatggataaggaaggaagaattccaagcacacaaagcaacagatgacttctaccacaatcttcaacataatggatgtaaactcctgttcatgcctttcaacagagaaactttagaaccatgtttgtgaaatggacccttttttctccagggaggttagagcaaattccataaagccagtcattcccaatcttggctataaatcaaaatccccttggcatgcttcctaaaaatacagatgcctggacccgtcctcagacctaaagaagcagaatctgagtggttgtgattagggagggtatataaaattttaggtgtagaatggtaataattttgcccaggcagcctatatgccccctttccatttcccacttttccttctgaaactcctttcaccaggtttcaatccatgtggttgggggataatactgtccccctaccaagaatgagcacataacccagacctgattgatcagagaatttgatccctctgtccatagcaattggttcagggataggcattcagtgcaacctgagccagtgagaccgaaacccagcattttgttggaaattttgggaaacagaagccctcttttttgttggaagcactagccatgagggtaacatgagcctacagtggcccaggggccaccacatggcgaggtcccccctaagagtaaagctcagtaggcaaagtagagcccaaggggaaagagatgattccagagattcttgaggaagaagcccaagaacgggccatcagacagaagacccagaaagcagacaggaccacagagaaagcaagccagagtcctgaaaacatcctccatggcctgactctcctctggccttacagttagttaggagaccctctaacctccctcgagagaaaagtcagttcgagttgtgtttttctattccttacaaaggaggtgaggcttcctaagtctttcatgtggttgaacatgttccaaagtttattcattcattcaacaacagttaattgagtgtctactatgtgctcagcactatcctacacactgaggatacagcaataaataaaacacacaaactccctgttctcttcatagcccaagtttcttttaaaaagcaatcatgttctctcatttttaaaagtatcacctttactttgaaggccctgagtaagtatgtggctgaccaagcccttgcaattagaggaacattaatggcgccttcttcctgacctgtgcattcttcctcccaaggaatctctttgtccacttgtccatttccatttggcaaggcctttcccttgagggagatgagagccatggccagattctgagtagaggagggatgtggaattggaccttggacaagtcacttcagctctatgagcctcatttacctcatctatgaaataggggtgaatcctggtaggcaaacaccacagtaataattgctgcaggcaagatccacccgtgaatgctgagattagtgggtgaaagtttgtggattaacaggaaattcatgtagtctcaaagtatcacctccaagatatttattcattacaaaagacaaccaagtaactttacgcaagagacacccagtagatgccaccttaaccaagtgatcaaggttaacactaccagtaataagaaatattggcatcatgtagcccttcatgtgattacctgaggatacaatatcacttcttgccaaaaaatgctcaacgcaaatctaatcatgagaaaacatcagactagcccaaactgcaagacattctacaagataactgaccactacttatcccaagagtcaaggtcatgaaaaacaaagaaggcagataagttgtcacagactaggggacactaagggacaaaacatctcaacgcaaagtgaaatcctggattggattatggtacagaaaaaggacatgagtggaaaagctgatgaaatatgaataatgtctgtagtttagttagtagtattgcaccaacgttaattttcttggattaatgtttgtgccatggttatataagttgttaagactggggaagctgagtgaagggtaaataagaaagctctgtactattcctgcaacttttctgaaagtctgaaattatttcaaaatacaaaattaaaaattggactgaataccagttcttactgtgtaaggatggtatgcagattaagcatccatcaagtcctcagcgcagtgctggataagcattctgtaaacaatagcaagcattgctgcgagcttcatagcaagcattgctgcaagcttctttacatctgttatcaagcacttactcatggagcacccacacgctcaccgctgcccagtggctttctctgtctcttgccctcatcagtgaattctctatttgggactgaataaagaggattctgcaaatcagtcctgaaaacaagagtttaaacaaaagcaaactgtactactctgattacaaaacagaaaccaagagtgctcctgagtgctgaatggaagggactcatgactccgcccctccacccccggaagcagatgaagcagatgacagaatttatttgaactgactgctgaatggaacagactcacgaccccgcccctccacccccggaaacagatagcagaatttacttggaaaggtcttagaggaaaacgaataaggcatctattcttggattgactagccaaagtgtcgacgtcaaaagcgccatttttggttttatccagggtctcattctcccctaaatcaatggtctgcaaacttctgatcaggcacacatattaggaaaatattttgaaacaattcctctaatgtttatgcatttacttgctaattatatacatttaccatgatattaacctattatgtaggtggtaaagcatataaaaggacagctgtaaagaggaagtgataaagaagaaataagtgatactttgaaaaaatttactcagtgatgtaaaaaatttccttactctcacttaaggattattgttgtttggatatcgaatatcctttattatttttaaatttttggtttattttatatggtttgaaattgtgcagtatggtttatatcaatacttgatttttatgattgtcataaatgaaaaactaacctcatagagctatatcttccaactggatgaagggtatcacttgctatacctatttttaaaaatgctgttcatcttccaattccatatagcaattttgcaaaggtttttgttgaaatttgtctagttatttttatcttccctgaggttaagctgttgttgaaaactaattaaaaagtgttgaatttttgcacttttagcatgagtttaaaattcactgacactgaaatgctaggttgagataattttaagttatattagaaaatttggtttccaggactttaaagtgtgtgcatattaaagcatttatatagagaatttacataattttgaataatgtaaatatgtcaacaataattccttaacaagaatatttccaaacatctgtttttaaaatgttttctccaggctgggtgcggtggctcatgcctgcagtctcagcactttgggaggccgaggcaggcagatcacctgaggtcaggagttcaagatcagcctggccaacgtggtgaa[140 bp omitted]atctctgacctgggtgacaagagcaaaactctgtctcaaaaaaaaaaaagaaaagtaaagaaagaaggaaggaaggaagaaagaaatgttctctccatagcccaagtttcttttaaaaagcaatcatgtcctctcatttttagaagtgtcacctttactttgaaggccctgagtgagtatgtggctgaccaagcatttgcacttagaggaacatgaatggcgccttcttcctgacctgtgcattattcttgccacctcctcccaaggaatctctttggccacttgtccatttccatttgggaagggttggttctattcaatgtagcatggccacaaagttgtcatctggtcctccctggctgtgccctctccatggggtcagagtcaacaaggctaagggactgtgcctatccacagcccacatccaatctcccagaccatgcaccctaagatcctggaattttctcccagagctgtgggagactcttccccagggctatcctctgtcctcctaagagcagattacatcccccatgtacacaccctgcagtccaaggagaagccaaagggtggtcagaaggcttggacatgagctggcaagtacaaacacttgtgcacaagaccttcatgatgtaggatggagctggagatggaatacaaaagggaagtgggctatgggccagattctaaagagttctgaatctgagcctggctcaccaggtcactgtgaagccatgtttgcaaaaggagaaagctagcacatattttattgaatattttgatatttagtcatatggtaagtggaccttttgtactcttgccctgggtcctacaaattgattgggacaggcttgtcacctgctgttgtctttcaattgcctcctctccgtgtgcagccacctctgaaggtcatttgatgagccttttcttatctcatgcaagtgtccagcaaactctcatttgaactcttcttgcaaggtctctaggcagctcctagcttgcaataagatggtgccccaggatttatactctcccaggtagagtccacggtgctgactgatccagtgaatgctcagttgggtgtgaatctgaaagttcagatctaccaataggagatgatttgctttggggaactgggaaagggaaacgttctcagctccttccaaaatccaaaaacccatttcaagggctgctgctctactgacttccgcctgccaatgtgaaaggtattccaaaaatgtggaggggaaatgaaaagctgtctttagaatggagagggtagaccagtcatttctaagtagcatcagttaactgatgtaacttcagcgcatcacagaagtaaatgaatgaggtaaaatgttttgtttacaacctctcaccattggaaaactccagctcttccttctggatgtctcaaacaccttgaaagccccaagacttgtgacacacaatcagagggggcaccacggcccactggaatagtaaatctcagtaaagcttaatgtcttttgctttattttagattaaaataatactcagaagtgaaagggcttatgttgtcttctttggtgtcagtggataatccgacttactctaccttggcaatactcccctaaattatgaattccaattggggtagctaaaaagcctcggaaaagactttctgctaaaatagatgccagacaatcaagattcctccaggaaaagaataaaagttaatagtacatgttggtcacatagttgaaaagaaatttagagaatttcaacttctgataataaatgtggagaaatagaggtagggtcacagaagaaagaggaattgcttagaagtcaggagactgagagccagcttctgttcatccccttcctaattgtgtgattgtctcagtttccctatttgtaaaatcagagggttagacttgattctctccaagttgaaaactcagatatgcatcaaatttagggctgtacactcaaattcttatgggggctagggagtaaagataaatgagtgacaggggccaggtgtgagacaataaggagtggtggagactggggtgaactagagatatagcccctactcagctgcagccagctgattccatttaggcagaaatataagcctagtgttgtagtgttgacagttctcccacattttttagaagtcaggaatccagatattatataaaatttccatattattaatgatggcatttatttcttaaaaatcatttttgaaacactatgctgcataaacaaatctcccacgaaaccagtttgtgacccattgcttcagaagacttcaatgcattaactacatttcaacttcattggcaacaattgctggaaagttcttcattttgccctgtcctcacacctttatatttacttctgccgaagatgtttatttgcctgggaagtggttccctaacagaaacatttgttttaactgttgtggcaaatcatctatttgttgggagaggtggaaaagaacagctaagacctttttcccccacaaacatttctttaggccagcttacgaaagcctttgctgatcggtttttctctgtaacagggcccagcattgtcttgggatgggaagatgcccatctgtgtggatggggtacaaatttccatcccaacactgcagatccagcacctgatgaggagccctgaataatcacagtggaagttccactcaatgctaacacttagcagccatgtgaagactcataaccctctcttcctctttctctcacccatctccattagctgggcctgcgtcttggttgactttgccgtatttatgaaacaatatcaggttaattcctatcctctttgcttcacatgatttcatgcaaataatcgctgcctacgtgcacatttcaaaagggacccttttaaaaatttgatccttcaaacttaactttgccctccaagcattccagactcacccagggcctcaatttttaatatatttgcacagaaaattatggaaaaaatggaatctaaacaatggacttgatttttaaaaataatcaggcaggaattaatgtttcaaaataattgtctagaggtgattcaatttcacatgctctttaaatatgtatttttcagtgcactatggcttgaagggatgatttcaaattagtgtatatagcaggctgtgaatcataaaaactcttatagttaagtttttcatttctttgctgcaaaacttcatttcaaaactgaaattttaccttcctggtaaatctcctttcctcccctgccaaaataattttatcaatacaaaaataaaggattggcttttaataagtacaacttagagattttgtggcaggcagcattcaaagatgctggtgttggccaggcgtgtagctcatgcctgtaatcccgacactttgggaggctgaggtaggaggatctcttgagcccaagaattcaagatcagcctgggcaacatagtgagatcccatctctacaaaaaattttaaaaattagctggatgtgctggtgtgcccctgtagtcccagctactcaggagggtgaggtggaagacaggaggctgatgtgggaggatcgcttgagcccaggaggcagagactgcagtgagccacaatcacgccactgccctccagactgggtgacaaagcaagaccctgtctcaaaacaacaaaaacaaaaacaaaagatgttaatattaatgtcctggataattccttcttctcaagcgtgggtgacacttctgacttgcttctggccaatagaatttggcaaagacaataggatgtcacacctatgagtgtatgtatatacaatgtaaaatgttatatatgtgatttttttaatatttagggacagggtctcactatgttgcccaggttggactccaactcctgggctcaagcagtcctcccacctcagcctcttgagtagctgggactacaggtgccagactttttaatatataatcttacgtgtgtgtgtgtgtgtgtgtggtgtgtgtgtgtgtgtgtgtgtgtgtgtgtgtgtgtatgaaataatcttgcattagagtaagagagagattctggccttgaaaaagcaaacagccatgttgtgagttgcttatagggaggaccaagtggcattggcaggtggcatccagggtctgagggcagcctccagctgacggccatgaagaagcagggccctcagacatacaaccaccttttgtacctgcagactggtaaacaggaaaaggtgaaacgaggaaacaaagtgtgccagcaacctacctgagctttgaaatgtgttcttccctggagaatgcagcctggccctatcccgattgccttctggtaagaccccaagcagaaggacccagttaagccatgccagtgctcctgactcatgacaactgtgagatactaaatgtgtgttgttttaagctacttagtgtgtggtgatttgccacaccacaacagaaaattaatacaaaatttatttggaaggactattgcaaaatttatcaaattatagaattttaacagagagaatttttagctcaacccttttgtttaacgtgtgaacaactgagaatcagaaatggaaatagtcacagatcaagttagtgataaagccaggaacaagtttcctttggccctttctgtgatatcaagcttcttccctgtaaggaaccactggtattgactttttctctttttctctctctttctccatatatatacatatatatatacacacatatatatatatgtatatatatgtatatgtatatataacgatcactctgtctctttttcatatgaatacatttataaatatataaatttaaaatataatatatgtaaatacatacatatattattattgttgaatcttcccattaaaaaaaggttgaacgatttacatatctcccaatacttgatgggcaaatccatttcctcacaattgcacacaaatctgttattattcaccttttcctgtttatcaatctgcaggtacaaaaggatattttggtgtgttttattttagccattcctaatatttaagcaggctgaacaccttgcttaatgcttattggtcagttctatttcatggtttattaactgcatgttcttactctgttcactgttatactgggttgtctgtcttccctattgatttgtaagaattcttgataaatgtgtcctgagttattagcagtttatgtggagttaggtgtggtggcttatgcctgtagtctcagcactttgggaggctgaagtgggaggatcgttcgaggccaggagtggaaggctgcagtgagctatgatcctgccattgcactctagcctggacaacagattgacaccccatatgtaaaaataataataataataataataataaagaaatagtttagctgtttaaatttagcaactgcttcttctaagttgttccttgtgtggttttttttgttttgttttgttttgtttttgtaggattcacttggacatgcaggctagagtgcagtggcacaatcataatcgcagctcactgcacccttgatttcctgggctcaagccatcctcttacctcagcctcccaagtagctgggactgcaggcataagccaccacgcctggctaatttttgtattttgggtagagacagggcttcaccatgttgcccaggctggtctcgaactcctgggctagaacaatgcacctccctcggcctcccaaagtgctgggattacagcgtgagccactgcacctggtctcccttgtcttttaatttagtttctgagataatttgctatgaaaaaagttttaaaccttttgtagtcacacttatcaatctctttcattatggatttggattttttggctgtctgattcgtttcagttgttgctgcttgatcttgctcagaggaggcctccccactctcgtgttacagaaatagttccacgctttctcctagtgtctttaggtcttctttcttttttaaaatgtgtactgtttattccacatggagtttgtttttatgactgaggtggggtaagaattaacctttcccaggagagccaattgttccaacagcattgaataatccatgccttccccaactaagcaaaacagatgtgcataaatacgtgcatactcctagactcatattctagtacattgctctattcatctctctttttttttttttcctcgagatggagtctcgctctgtcacccaggctggagtgcactggcacaatcttggctcactgcaacctctgccttctgggttcaagtgattctcctgccccagcctcccgagtaactgggactacaggcatgtgccaccacacccagctaatttttgtatctttagtagagatggggtttcgccatgttggccaggctggtctctgactcctaacctcaggtgacccacccgcctcagcctcccaaagtgctgagattacaagagtgagccaccatgcctggcctatttggtctctttacgccaacacttttccattttaattatcatagctcccctatctatcttgatatctggtcaggtaatttgttattcatttttaaaatgtccttgtcagatatttcctccttcggatgaattatagaaccagcttgtcacctttgaaaaatcatttggggctcttcctctgccatttttttccctttcccctttgcctttcttcttttctcttccattcctgatcaattcaatgcaaaagccattcaaaaaatgataagcacccatggggggcagtgtccaacacagaaaacctgacaccccaggcaggaggtggcttccccacaggagaagcaggagtggagcctggcaggggagtcagagtcctagggagtgaggagggtggctttgcagggatggtatcctgcgcagggtgggtgcccattgcctgagagtgaggaggtgggtatgcctgctggtgggtggcagctcctggacaaggtgccagaaccccagcagggtgtgaggtcagcttctgaatggaggatggattgcaaacaggggcaatgagcaaattagtaaatatctcaaggatccagctttctcacgtttggaaaaagcagtactaattatgtaaagggagaaaacagagtgaaccctgaagcgttggattggtattgcactatcggtctaagccagggctgacttcatggacgtgtgatcagtgcatttgcatatggccccgtgtcatgtcatacactcaggtgttcatgctgcaccatcactgtcttgaaattcttaataacttaatctttgaatttgtatttcgtaagtcaagtctcatgggacagtgcagcatgcacaaagacttggagtctgagctcagcagcggtcccatgtcccaccatctccctgcctccccaggatcagggtctcagccacctttctcaattcccacagttcctcagacccctctcagcctccttgttcccctccccacccagcaaccactgtcatcttctgccttcagtgcctacagcgagcacatctataccacgcccacccacaatccaggtacttagccgtgtcctggctcagaggttgcaatacccctgaggatgcccacctgctatgggttagaggagtgggtcgaggggaagagtggatgctttgcttcattttcttgccccagcagggacacagcacatcagtctggtgactggcaggagagactgcagctggtaggctacacttgctctgagtcccagcgtagagtccctgggcacctgtgagtctctgccttcaccccaggagtatcctcatgcacgatgcgaaacagcaataaaaaccactgtgacaaatccagagggagaccgtggaggtaagtgaagagcttgtattttagtacctttattggctcttcattcctgctttttgaacaaggtcccccatattttcattttgtactggaccctgaaaattatgtgccagtcctggtataaactcatgattttcaatatatttaaattgattcagaaataaatattgatgtaagtgtatgcctgcatatatgtgtctgtacatctgcatgcacctagctctgtccacggagagatcctgagagtggccgcacagtaggaaaaatgaacacacttagcacctggaccttgtcttctaaaaattattttatttatttatttatttagacaaggtttcactctgtcattcaggctggagtgcagtggcacaaacacagctcactgcagcctcaatctcctggactcaagcaatcctacctcagcttcccatgtagctgggactacaggtatgcaccatcacacccagctaattagcttattttttgtaaagatggagtcttgttttgttgcctaggctggtctcaaactcctgggctcaagcgatcctctcaccttggcctcccaaagtgctgggattacaggcatgagccgccacacctggccagtttctaaaaattattttctgctaaaaagaactggagatttttggagaaacagctaattccagatccagggcaagatgagtagaagacaaacctgagtacctgttcagccaaaaaagaaggaagtaatcaaagaatgatggggacatggcaagaggacacggaagccagcaggaagaggctcctactggccacacaaaacactttttaattacaaaggaagaaagagtaacttgatagtggagaagcctggcagacaccaccttaactagaatcagagttaatgtcaccattaagggaacaaattgaaaacatgtgctatgaagaacgcagcatcacttcaatggtcttctcgccaaagacgcataacctgaatctaaaaatgagagaatgtcagattaatctaaatgaggggcattctgcaaaataactggtatatcaataatatatcatataatatgtaatactatatagtatacacatatatactatactgtaatagtatagtatttaatagtataatagtacagtattatatagtataatatactatataactatataatactataatagtatagtattacatagcataacatgctgtataattatatagttatatagcatattatgctatgtaatactatatatattatagtattatatagtatatgtataacagtagagcaggatattatactatatagtattatatatactacatattgaatatataattgttttcttttgaaatatatattttatatgtatatatgttttcttttctaaaatatatgcttttccagatctttttaatgtacaagttatttcaaatagtcctctgaatttttctttttcttttttttttttttaagagataaggtctggctctgttgcccaggctgtagtacagtaggctcaagtgatcgtccctcctcggtctcccaagtagctggtactacacacaggcaacacgatacttggctaattgtttttattattttttggagaggcagggtcttgctatgttccccaggctggtctcaaactcctgggctcaagtgatcctcccaccttggtctcccaaagtgttgggattataggcatgagccactgcccccaacctagtcttctgaatatttacatgggatcgagtttcaacatgagttttggaggggacaaacactcaaaccagagcaatataaaagccacttattaaagatgtctttctgtcacagtggtcaaactgataccttcattaattcagtcactgaatgctgaaagagaattctaggtaaaggaagaaatcattccaatttgggagatcataaaaagattattttgtttgatcttcccaataatcttgtaagaaggtaagtttgcatgttggtatttaactgccattaatgttgtaggttgctaaaaaatgcttacggtacagctatttttccccctttgggatttgtctacgctgttggagagggcaggccaagggattcagttctgctgaaggaaccggggaaaaaatgctgtccaaaccaactggggttttggcaatgaatgcacatttgttcaccagttgagcatttgtttagattcctctgttttgaaaaattaagtggttcagtattttaaatttgttcctaagcccagtataatgaatgacctttcatcttcttaggtcactgaaaagaattttcttgtgtttgtggctaattcctcactggcagaggcccagacaggggacaggagggacgctcaggctgcttaagtcaaaaataaacacaggaggagggaaggaccccgaatgtcccgtgtttgttcattttcaatcatccacactgtcatgtgtgagtttgggtggttttgtatacagaataagctgtacacacattctaggaaataattttgaatgactaaagttgcaatttaccaaaccttgttttcctcttgaattttaatgtttccttttcaaatctgtgattccatttataagaatagaataacaaaaatcagtcactgtgtttgagaacgtcattgattaatatttggtctcatttataaacgtagccttcaaacatttaacatttaaatgctttcaaatactttaaactgcatttctaaatttgatattctggactttgttttcaagtacttcaactgtccaacacttctgctttcccaagtaagtacttataagtctaataaatcacatttctacaaatcttaaactcttaaatgttccagtgggtacatgttagcttagtaagatttctgctttaaaatggcacatttaagcaatggtttgattccattttaaattacgattaacaagtttgaccaacatgttgttcttatagaccgaagcctcctaaacataaggctcttaaagtatgtaaattgttaaatataaattattcctttttaacaaaaagaatagtaattcagtgatgatgctgaatttgtcaaatatgtccatgtttatttctgaatcttatctctgttacacatgcttacagataaaatcactttcccatggaggacattcctataaataactttaaatattcctggagtttaaagatgcttccctcctgggagattatcatatttctgggtactcaaggttgcttccaactagactttttaacctggggtttgtgaatagaattaagggggttcgtgaacttggatggaaaaaaagtatctctattctcaccaacctctaactgaaatttggcattctcttcacatatgaacataaacaacaaaccacaattgtgttaccaggacctgtgactctctcaccaatagaaatgacaggttttgttttgtttgtttgtttgtttgtttttgagacggaatcttgctctgtcacccaggctggagtgcaggggcgcaatcttggctcgctgcaacctctacctcccaggttcaagcgattctcctgcctcagcttcccgagtagctggaattacaggtgtgtgccaccatgtccagctattttttttttttttttgtattttttgtagagctagagttttgccacattggccaggctgtcctccaactcctgacctcaggtgatccacccgcctcggcctctcaaagtgctgggattacaggtgatttttatatcacattatggttgttgtatctcaaaataccttttctaggcagcactaactttaaaattagcttgctgctagatcctgttatttagtgcattaatgaagaaactcacatggccatatcacaatattttcatatttgtattcaccatataattgaagtacaataaactggaaatacttaaagtgttaaatttttttaccatttttgacacatgcaccatgaaaccatcaccgcaatcaagacactggacttttccgtcacccccactggtttctctgtgcctctctgtaatccattcttcccttcactcccacccacaggggaccattgatttgctttgtgtcactatacattagtttacatgtttaagaagtttacataaatgggccaggcatggtggctcacatatgtaatcccagcactttgggaggctgaggtgaacagatctcctgatgtcagaaattcaagaccagcctggccaacatagtgaaacctgtccctacaaaacatacaaaaattagccgggtgtggtggtgcaagcctgtagcccctgctactcgggaggctgaggtgggagaattgctggaacccaaaaggcagaggttgcagtgagctcagatcctgagatcacaccactgcactccagcctgggtgacagagtgagaccttgtctcaaaaaaaaaaaaaaaaaaaaaatttttacataaatggaatcatgattcttttttggtagggaaggttctgcctttttcactcaacatcatggttttgacatccatctgtgttatatgtgtatcaatagttcattcttttttataatttaatagtcatttattgcatggatataccacaatttgtttattcatttacctgctgatggacatttagactgtttttagatttgggctgttacaaacaaacttgctgttaacaatcgtatacaagtcaagtctttgtgcggatttgtgttttccttcctgttgggtgtcaaataggtgtgtcagatgacagagggatgtgcaactttttaagaaactgccaaactgttttgtaaagtggttacaccatttgacattcccaccagcaatgaatgagagttctagctactctacatcttgccagcacttggtctggtcaatctttttgttagccaatatattgaatacacggtgacattttattagagtttaatttgcatttccttgattattaatgttgagcatttctttatgtgcctattgaccatttgtatatcatctttttgaagtgctggtttgaaatctttgcccattttaaaaattgagttaattgtcttcttaattgttgagttgtaaaagttcctcatagatctgttatagattccttatagattcagaagatatgtctgatacatcacatgtctttgatactcagaacatgtacaacacatgtatcagacacatcttcatatatctgttatagattctgttatatggatagattccttataatatagattccttatatgtgtgtatataatatgtgtaggtgtaatctcagctactcaggaggctgaggcaggagaatcacttgaacctgggagcccgggaggcagagattgcagtgagccgagatcgcgccactgcactccagcctgggcaaacgaaccagactctgtctcaaaaaaaaaaaaattataaaacttccagaagaaatcattgcaacctcggggtaggcaaaggtttcttcgaacacaaaaagtacaaaccatgaaataaaatattgataaactggacgacatcaaaatttaaaactttcgttcttcaaaagacaaaattgagaaaataaaaggcaagccatagattggcagaaatctatcacatatatcagagacattttcttatatctgttatagattctgttacaaggatagattccttataacagagattccttataacagaattggaggttagaagcaagatggttaagttggatctctttcactgtctcagtcataattttgcaaaggtggttccaggcagagagaccatctgtcccagtttgctggggacaatcttagtttatgctttgttattaatgctccttttgctctcaaaagtgtcccactctcaaaaggtctctagacctctgaccttgagggactcctatagtctcttcaggtactccttacgtcttcaggaccacaaaatcttctagaatttagaacaatatctgttggggttctggggatctctgatgtctctcagtccttgcttccgagataattccaccgatgcacgctgagatcagttgactccattcaccatccaagacattatatccagctaaaagccagcaaaaagacaagacaaatgtattaaaaagccttctggcttcattctatttgtttttactctcctgggaaaagagaatgcaaaaagtgacagatcttggaaggaaatggccaggaggtgtagagattcttgtgcttagctgagagggccagcgtggagctgggtgaggaggtcacagaggaagaacagttagaggagaatgctgttttaaacagggtggtcagggtctctctggggtagaggcatttgagcagagacctgaatggagtgagggtgaaaaccataggactatgtcaggaaggggtagtgcaggcataaagagcagcatgcctgggtgtctcaaaggtccctcttcacatgagtgaattaacatctcccaccgaacactggtgatcctgaaattctgatgctctgccagaaaatgcacccaagagttgatttcccattgttttaaatgggaaacattataatgcatgacaggtcaacccaagcccccaacaccccaatcctcatggcctaatcacttcttcaagatcctgggctcaagagatcctcctgccttggcctccccaagtgctggcccactttcttgataatgttctctgcagcaaaaaagtttttaactttgatgaagtctaatttatcttttgtttgtttgtttgtttgtttttttgagacagagtctcactctgttgcccaggctggagtgcagtggcaagatctcagctcactctcttaaaatagagctaagcacttaaaatgctgtcttagtctgtttgctctgccataacaaaatacctgagattctggtattttataaagaacagaaacttatttcttatggttctggaggatgaaaagttcaagatcaaggtgccggcaggtttggtagtctggtgagagctgctgtttgcttgcaacatggtgccttgttggtgtgtcctccaaaggagaagttgaagcaagcctctatttatttaagaaggacctgaatctcattcacaagggaggaaccctcatgacctaatcacctcttcaaggactcactttttttcttttctttttttttttttgagacgaagtcttgctctgtcacccaggctggagtgcagtggcacaatctcggctctctgcaagctccgccgcccgggttcacccttttctcctgcctcagcctccagagtagctgggactactggcgcccgccaccacacctggctaatttttgtattttttagtagagatggggtttcaccgtattagccaggatggtctcaatctcctgacctcgtgatgcgcccacctcagcctcccaaagtgctgggattacaggcgtgagccacctcgcccagccaggactcacttcttaattccatcacattggccattaagtttcaactcctgaattttggaggggacacattcaaaccacagcacatgtctaccagtaagtatcaaagcagtaaaatgtttcaaacatagcttcctgatcaccaaatcatcaggaaagttttcaacaaataattggtttgtctgtggcaacacagccacatctgattgcatgtccctttcattgctccttagtgtacttttctaaatgtgattctgatgttctctcagtggtagttgacatgctgcttttcctgcatggtgttttgatggagatgctaactctaatttgggggatacaaatatcagtttttctttgtaaatattcatctgataattgtgagaaatgtgccttctatgaagtttgagtattaaaaacaaagtcattttattggaaaactacttactgaagagacatttgaagcatccctgtatttgtctgcttgggttaggaaggacgtgagatttctctctctctgtctctctctctctctttttttttttttaatgtttgcaaaaagcccctgcccatccccacatacacactgtatcataaactgccttttttgtaaagactcatgagaaaatttctctcctgtatcaatatcaggcaaaactctgatttgcccaagtcatttggtttctttctcatagaagaattaagaatcatgaacactggctgggcacagtggctcacgcctgtaatcccagcactttgggaggccgaggcaggcggatcacctgaggttgggagttcgagaccagcctgaccaacatggagaaaccccgcctctactaaaaatacaaaaattaactggtcatggtggtgcatgcctgtaatcccaggtactcgggaggctgaggcaagagaatcgcttgatcccaggaggcagaggttgcagtgagccgagattgcatcactgcactctagcctgggcaacgagagtgaaactctgcctcaggaaaaaaaaaaaaaaaagaatcatgaacactatggagcactttgaaatccatgattcttaatcttgactctgcagagctttgggggttccttcaagacctttacacatacctacaggagaaaggggtgaggcataaggctgtggctgggaaccctcacctcctttttccatactgaacttctatacatactagattttaaacaaaggaaagtttgaaagccactgatgtaactgatcacatttctgtccttgcagtggctgcctggaagctcagcatctaattctcagttctccactgacaagtgtccaggaccttctagctcacattttgtgtgcaaaccttaccttgactttcttttgttttctttcctgtttccctgttgtctgcttttcttgttttctttattctgctgccatatatatggttttatatgttgcctcaaatcctttttggaaagagccaaggtttaagtgaatgtattttaaaaaattgaatgctttttctgtagaggtgacctttgcaggtgggaaaggaatatgtttagaaaaaaggcatgatttgtagaattcacatgtgtgtttgtaggatatgtatatacatatcctacaatgaatatacatacattggatatattgtgaggttcatagttttcaaaattaatgtgtttttctggctttagagggcatttacttggaagactggagtgggggaaatgtgttttactccaaggtaggcatgactgtggactacaccacaaagaatctgctgtatggcttagcactttcaaattttgtttgggatcattttgctggttgttatcaaatgaggacaaatacttaacaaagagatagcaagggaagaaagagacagaaagggggtgcttctacataggaaggtggctgaattttcagggtcttgaattagcattgggggcttaagtcctatcagcttctgctcatctgctgtgactctgtggtcaaggtctcactctcccaaagatagggattctcttcctctgctgtatattggaatcacctagggagctttaaaaaaggatgatgccggccaagcacagtggctcacgcctgtaatcctagcactttgggaggccaagatgggtgggtcacctgaggtcaggagttcaagagcagcctggccaacatgaagaa[141 bp omitted]actccagcctgggcgacagagtaaggctccttctcaaaaaaaaaaaaaaaaaaaaaaaggcagatgccacagttccaccccagagtctggtttaattggtctaggatggggactcagcatggagatttttaaaagctctccctggagattctgtgcacccagagttgagaatcacagcgctaagagaaggaaaaataaaattaataagcacctgcctcctgcttatctctcagggtcgttggggtgtgtctgtaatttatgaaataatgggccagattctggggaaggaataaaatggtatgaaggaaatagattaaccctttgcattctatagggtacctttggttaacaagtgttcaagatttttccccatgagccacaggaagaaacatttcacatcctgaccaaagatatagatatagatatggatatagatatagatacagatacatgtgtgtatatatatatgtatgtatgtatacgtatatatgatatacgtatacatatatacatatatatctctccattgtaaattgaaaatatcctaagttcaaaatgcatttaatacgcctaacctactgaacatcatagctcagcctaacctaccttaaatgcactcagaacacttgcattacctcgcagttgggcaaaatcatctaatacaaagcctattttataatacagttttgaatatctcatgaaatttatcaaatattttgctgaaagtgaaaaatagaatggttgtatgggtatctcaattgtggtttctactgaatacacatcactttcacatcgtcataaagtcaaaaaaatcattaagtgaaaccatcataaattggggaccatatgtatacatttaactatatataggggatcatatgtatatatgtaactatatatgtataggtatgtatatatattcttactgcatacaattcacttgatatttcctattccagtctattcctttaggaaaaaaaaattaaggttcacaggccaagacaaattaaacacctctgaaggtcattaagatgctcaatttataatgacttggagcacttagcaaagatactatgggaagtgaagctgtgtgtacagtaataatatttgttgagcaattgctagtgccagctgcagtcatagtagaaagtgttttatgagcatgagctccatgaattttcacaataatagtataagatgagtactgttattttcactttagtgatgagaaaatcaaggccaagtacatatgtacattctgcctctagaagacagaagcagagccatctccaagcctactgcggcaggcccagagaagagaacaaccatgtttactgaatacatttgcttctgtctgaagtttggggagtagaaagcggagtaagctatgaccagaggtgggtctgggaatggtgaggcctgatacatgtataatttgcagcccctattcaagaaaaagagtacaaaattatgagtccaagattagataagaaaatgattatttctttaaattaagaaaagaaatcacaacaaattcaaattttaagaagctgaaaattaccacaaacatcacaaaattcccaactcaactttcctccaaaatgccagcagccacctgacaccaccctactcaagggcaagttgggggtggggaatcggagtggaaagacagcggtgtctacggcctgcagccaaatgtccaaagcaaaggacttttgtaaactttacatcaacaagccaccatctgaacacttttctaagtccccttagaaaggggtccaagcaagtcaggggcccaagaacttaaccttcatcagctcctgtaaacttacaactggaattgaagactgttacggctcaagagcaacggctttggagtcagccaggcctgaatttcattcctggctcagccactttctgccttctttgagcttggacctgctcatttgtgaaatgagtgtgctgacagcagctaccttggggtctctcttggggattacatgagataaggaagagttgggcattggatgagcttaaggttgcaaataaaaatataggacccccggttacattggaatttcggagacaaaagaaatactttttaaatataagtacgtacaaccaatcgcataagacatatactgcaactgattcctcgtttctctgaaattcaaattcacctgggtgccctgtcttttactgcacttaagaaatgacagtggttgatattgcttttggattgaagcatcctgggtgtcccacggtggaattcatagacattagagagtgggtgacgggctaggaaaggctgcatagactccaattaacacagttcattgccagggagactaaaaggggggtggctatgagaggatggagtaagtggggtgccttgatttgggcatgtaggtggagggggctatacctctcactttcactaaaccagttaagctcttgagacctcagtttccttagctgtaaaatgggtgaaacataggggagacccctgaaccgttctcacctaaataccacaccaatggcacttcctcataattcagatgtcacctcctcagagaggtcttccctgactgctctagctaaaattaccgcctctcctccactccccaacagcagatacatatattatttttctccctgtaactctaactttctgaaactgtcttgcttctttacttggttatttgtttatggtttgcctctccatgtgaatgcaagttccgggagggcagaaaactagtctgtcttgttctagctgagtctctcaggagtggtacctggcacagtagatgctcaatatattttgaatgaatgaatgggtggttgagtgaacgaatgttagtgtcactattgaggtcctctccgagccgtcgttcctttcacaggggtcatgcctgggttgcagggaggatgtgctgccccggggagggaggaggtgcggggtgtcggtgggtggggaggaggctgggccctggcctccaggaccggcgagagtgagcgcgctctgctcggctgcaggctcaggaagcggcgcggcggcacgtgctgggccagagccccgcgccctgcgtccagccgccgggtgtgtgcgcccgcgtagcccagcgtcgcgcctcggcgcccccacgcgcccacgcagcggcgcggggacccgggcgggggcagagggagggcccggcccagggaggagaaggggccggtcctcccggcgcaggcagcagccgcggcagcccaggaggcggaggcagcggcaacggcagagacagcaacgtgcccgccgcagtcagcccggcctcgtcggacccgcaccggcccgcccgcccgcccgcaccgcgtcggggcgccctctccactgcgcgcggtgagtaccgccagcggcgcccaccccaggccgcccgccgggattcgccgggcggggggagttgttcaccgggaccccctcgccctgcgcctctttctggcactcgccaagcggggcctccgcagctgtcgggacgttctggggcgcacgggcctcccagggccaggaaggcacaagggcagaggggacagcagcagagcccccctctggaaaggctctcccaggctcggggccccagtttccccatgcgctttggggcaacgaccctgaagtttgctctcccgcgcgcgggacaagtgcatggcgcgcaggcggtgtagacgcggctgggtccttggcgttttgttcgattatggtcccggcggttcgcgataaggggcgctcccccagtccgcaaactcaagccctcaggtagtgtttatgggataaccaagaagcagagccaaccgctggaatcccggcttggggctggaacggcccgctgagactttgccttctagctattgatatatttcttttcaaaagtccgtttgcgctcggcccgctctggttcaggtctggggctttgaaccggggcagggaatcctggcgcctgctgcgggtagagttgaaacttagaaaagtttacatccgaagggtgtttagaaggcggcaaggatttcgttgtaatgggagaaagtgggaaatggaattgttttttagtcatgaagtctggaggttaaacggccgtgctggcccaggctccttcaatatattcctgcctgcctcccccccagcaataaatagtttataagctcaaggaatactaggaaagcgtgactggtgaacgtactcctatcgcaaaagactcagtgcgcttttctcagctgttgaactggaagcgccttttgcagtgcgaggttcctgcttccccgaagccgaggctgagagttgacagcgtgcaccctgccgcggtctgaattctttttaaaaagcaagaccgatgctgcgtttttatggatacccttttcttttctttccccttccccgaaatgctatgtaatcttcaattactttttaaaatataacgtggaggtataaatcaccccggtaagaggtaccttttaattacgaggtgcagtggaagagctgaacattggaatctagctgttagcgagggcggaggggcaggaggatgatttacaaacatcatgtaagaatttgagcactgaattatgtttgagttagggagatcccttacaaaggaaattataaccagtggacaattgtatttcaaaccgaatctattaatttcatgagccgtttcttgattgagtgaaatgtctgtgaccataatagatacagaactagtaagcaccttaccagactatgacccatttgttagcaactaacatacacatgtaaccatcctgcttacaaaaaaaaaaagaggtacacaaagaaagagtgggaggagagaacctctttttcaaaataatctttgtgaaagaatctttcacaattttactcgataaataaatgttcattttttccacttgtctttcttcatcaccttaagccccttcatcctttacatatctttgcatttagacactctcacacttgggtaagttcttctataatttatataacaaataacaaatgatagtggtttgaatcttgcttttgactaagcattaaattgtgtttgtattaaaaaaaatctccttgccttcgtagcaaactcttaacttttgccattgtgaaaagaccaatgtggttagatgcaaaagagcctgaacttttttttactttaaagcagtttatatgtccccattctcttgtaacttcagcttcacaatatcattcactattttatctgaaaggaattggcatttttcttttctgtcttaaaatagctcacctggtgttgtgaccatgtgtatgagaatactctataaacacacaaatcacttccccaatatcagaaaaactaaaggaaatataaaataaaataaaaagatgtgtatctcaatactttaggatttttttaaaaagttttcatcacgtaagttttagaatcttcttttcatgtcttttgttttgcattaaacacatcataaagaggtatgatttgttgacttgttataggattaccatttggcaaaaacgcccaagacacgctgtttcaaatatgtggtattacttctgctttaaattgcgtgtaagagattgcaaaccttgttccagatggataaattgataaaatgctagctgctgttgggagaatggaaaagccctcagcaaaaaggctctgtggtgtagctaagtacattttgaattagggtgagcaagctatggagaccccagccgtttgtgaaaaaatatacacagtccaagcacgtccactttaagacgttgttggatcctccgtgacaagatgactcctttcccacaaagaagaaaccgtttccttattttttcagttacttttccaaagacaacttgcatcgggcgcaagagagcagagttatgcagaaatccaaccgtaaccagctcagagcgaggactcattctctctccttccaccagatgttttttaggtgtcctcagctggaatgcccagtttgaaactaattaggccagcagtaaactccttgtataataaaatcgcaggccgtaatggtgaataagtgaggttcccagccgcttatgacagatgcctttctgggcagagagagaagagagcctgtggctgtcaggagaaaatgaagggagtggaggtgccttctttagacacatgcctttcctaagtatccacgcacatgatcgcagagcggaggagtggaagttgcgactggggtagagttttgtctttgctgggcaggcctccttcatacaaagatgcttgggggagaatcaattataagtattaggcagtgtcttcaggtcttaggtgtatgctgtgtgtgtgtgtgcaaaggcttggggagaaggattggtgtcacgtgcggggcagtgtaaaaaacttaactgcttcccacctgggcacaaaatgaaaagaaagactgcctggcctgacataaattccttgggagagaggagaacctgctcccccagagacttttgataaagggagaattcgcctaatgatgtggttccccttatctgtgaggtttgtgagggtgaaggagttggttagtctgttacctccaaaggctggactttctgactaagactgggttttgttggtggaaggaaccgggttttttgggtttttgtgttggttttttttttttttggttgtttttgtttttgttttttttagctaactgttctgaaaaaggagttggtagactgtgctcaaaaggaatctctttacaaagaattaatcccagagttaagaaaacacagcctgttgacagaaaacacacacacacacacacacacacacacaccacaattcttcactcactcccaaccctcttccctgatctccatcccccaatgtcataacagcttcctgaatggcccacttctccccactatcatttgtggcagttcaaacagtcctaaacatacaaaacaaaaagaagattctggtaagaaaacaattagcagagaattcgctggagacaatgcttcgttttcactgtttgaagatcgtaactggcctaatggtgtttgactaacacccttttctagtcggaggaggataaacaccccctccgtcaggtggtaaatacttgaagtgacagtaactgaggctgcagacccacttgtgttattgtaaatgaatcagaggggcaagaccttgttctttacggcgtgtgatttaaaatcagttttaaggtacctgccaggtgtatttagaggaaaaggcatgaaggaagccacaggcttatacattcatttttagtgcatatttctttttgttcattttcatcctattgagttcctttgtcatttctctgacttgcaaattatacccttctgtttaatagtaatgatgaaaatagctgctgtttattgagaactggtataccaggcctgcagtcagctcttcacgtgtatttttaaagtggattcttgccgcaaccccttgagtattattatcattatttcaactttgttaacaaggaaactgagtcgcaggtcaaatgaccgacacagggccagactgagtgaaaatgaaatctacgcttttgcttctctgcaaagtatgccttatccatgtgcaatacaagctttggctcaaaacatttctgctatcatttcctttggaggaagatgctgaatttggatggttttaaatgcacagaacacagttattttctgaacctgccctgacgttttttgccactgtcgtttgaaatggggaaacaaaatcatattaaatattcaggaacacaaatacaaacctctgtgagccatgacccttaaccggttgggtatggttctgtaaaggaaaatgacggtttatttaagggctaatttgatttattccttcgatactaacactacgcatttcaggtcctaaaaagagtcaataaatttaccggcagtggagaggccctaaaacattacggtaggcgcagcccaagtcaagtttaccggaaggtgctggatcgctatgggtgggtgttgtttcgggttagattttaaacatttggagagcaaagaataatttggaacaggtggtgccgagagtcaggtagctggaatgatttatctttgcctctttgaacgttaagggaggccactggttgcctgaatctggaaccagcaggctgcgggtcagtgggggctgagagactcgtctttgggacaaactttggcaggatccaggggcttcgtcagcgctgtcatcgcctttggatgatagtagtcagaacacagttgtgcctgctcgtgcatttttgaaaagtctgcctctgccttcagatatatgcagaaatctaaaacaggaacttagacgcgccgcaatgccaatttaaacatctttaaaaatgaacaaagtatgtaatagaggttagaaactcttttgtcatttggtatcaatagtgttgtgtcagtaacatgaaaatgtgtgtaatttcaatggcattgcactttcttcttcttttttccttttgagtatctagtaaagttacattttttaaaagtctgtgttcccagatgtaatagatacgaacgtatctacttgcagtcattcagaggagaattgtcaactctctgctaatgtaactaaaggaaaaatgataaaatcaacatatttttccccaaagaatgaggaactggagggtttgactactgtatatggcaacttacttttgtctcgcgtcagctaaatctgtcagttcccctttcttttctattcatctcccaagaatggcctttcataactgaaatacacgtgtattagccaaaagacattttaattttgtaaagaaaaatcatgccagagacagccgggtctgtttcaaccattattgtttctgcagcatgcatactttgggtttcatggtaagatgtgggtttgtcaagaaagaaaattacagcaagaagctatgctgaaaacatatacacttctgtttaagaaatgagaaaaacacagaaaaattccacacagtaattgcttttacgtgagttttaaatgtcattgtttgacttatgtcaaaaagcccccttagccagttctctcatactccgttaccaaatatctcaccttaaaaacagcaaatgttggacttcattttgatgatctttgaggctttcagagatatccttagtcctagtggaaacattccaaatttttagattgtgcaggccatttttttaaggttacttagatatcgattttattttcttgacccaaaatgagaaaacacggggaattctcaaaagctttttacaggctgctattacgagaagagaagccaaaccaacatgtattaggtcatgcgcttgaagtgcataaataagccctatgaaggtcaccaaacagggtgaaaaccactagttctcgttaccttggccacctctaaattcctgcctgttagacgtgtttggttgaagtggacacagaaagcgggtttccgagcccgtggttgaaagatctcaatttgacttgggtcctcaaggcgtccttgtggtaaagggagataggaaggctgaaattctggtctcctccccatggctccctctcacggttccggagaaaaagcaggtactggggccttctcttactccaaagcagatgtttcctacctggtattcggatatgcggaagtcagaagctgaaaataaaatgaaatgaaaatgttccttctggtcagtttcttcacctcccattcccttcctatagtcactttgtggttaaggtattcatggtttccaaaacaattttttgttcccactatgttttctagcatttaagatgcaaggtataagtactcacctttaaatctctattgattggcagcttcctgaaatacagagtcagagagcgtgtccaccacgtcctgagtttggtaccaacccaggtgctgatggaaattccaagtagggagaaaacgtcctcttcggagaggcagggtgtcagcgcaaagaggttattttcttttgtgggtgtgtattatttgcacatatcaggacttttgtttcagggtgttctagaaacattgatctctccagcaaagttctgcgtgtccttcttggttgggaagggagcggagaggaaggagccccgaggagaatcgtgcacctttggccttttgtgtgactcctagagtagagggaagcctccgctgctcggaaggtgtcacgtggtataacaagttgtgacttgtgcctgtgttgtcaacagagttttagccccgtccagacatgaaaaagaatggagccccgaagatgattcacctccggtctgcgatgggcccaagctgtccagtgctctcctcttgctaaacagaccatactccctggaggagttaatggctggggtgtggagagaagaccggtaggaggggagaaagaatgccttaaactcagcaaatgtctaaaacgctcaaaatgtctcagcattgctcaggcacccacaagaaagacaaactgataaaaggacatagaatcaggctttttttgagggggaagcacagagaggttgggggtttgctagaggtttgatctagagtggacaatttttctaacaccttgggacccgattttggaaatgtcttcctgtagccttgctgtcattcctttgtgcttatttttagtgaattagttttggggattttcttttgtttttaagaaaacacagagttgtaagacttgtttgggaatcacaggttttattgaacacttattatttattgaatatttattatgtcccaggcattgtgctgtggaaatactttatatgttttgtctccaaatggcagtagatggaacgtgctgttattattatttctattttacagatgtggaaactgagtctggagagtaacttgtccaggatcacatggcttatgccagagccaggattaaacccagttttgattcctaaccactaggatgtccagcctgctcccgtggtataacaagaacttccctttctccatctgtctgccctggagagctagattttaaagtccttttccacttgcattgccttatggatatttatcgatggttaggtacaaaaatcaggttgagaaagtaagagacgccagcagattctcacaagattttgaatctgcccttgtagaaatgaatgaatgtttcaagctggacctatggaaatggtcgtagcatcactgcagttagtggcctaagtcattgcttacagctgctcttgccctataaccgcagggttgaacagccgtactacaaagaccatacggcctgcaaagactatctggccctttacagaaaaagtttgctgacctctaagctattgcaatatgacaagacaatccttgtagaccagaaataacatgcacttgggacatttcgtataccatttcaatgatttattatttatcaggtgcctccaatgtgcttgacacattgcacagtgataggggaaaattacaagtgacttcattccttcatccatttacttaacaacacttatttagctgtgttctgggctgtttactggagagccagaggtgagaaggaccaaatccagcatctccggtaggaggatcccaatgtgttctcaccagtatcccatggcctcttctttcctgagggtgcagagggtgttgacatgactttttgagctttctaatgtttgagcagcagaatggaagcaacacctcagtctgtagaccctcacccacagaagctatgcctggttcagtaagagcagtgcctcggcttctgcacctgaaaccgcactaggcatataggacttaccagtgccccaggcttactcggccgacagcaactctctgcttccctcaatgcgttgtgcagaatgaggaggaatgtagagaatcagactttccaaacctcagcctgggtactgactttcagcctcgagattaagagcttgagtccaggagccaggctgctcaggttacacttcccctcagtgttaacctactcctgcgtttaacttgggggtaagttaccagacttttcggtgcctcagtttcttcgtctgtaaagcagggtgaataataatgcaccttcctcagaaagctatcgtggagattgagttaataaacatgaagtgtttggaactacggctggcaagtggtatgaattatatcagtgtcagctacagttattattattatttatgaatttgacctgaagcaaattacttagactctttgggatgataataataatagtaacaacaataataaaataacttttcatagtgccattgtgagaatataaatgaggcgatacatggaaaacacttagctttgctacactgcctgcctccattcaatgttcaatgagctagctattgagattatggggaacagtgcactggatcagtgcggtgtctataagctattgatcagttgagtcattttaggtatcgagagaatgttgggcagtggtcgatagcacaggccctggactcagacagatctggcctgagcctgagtcagtccatcactcacggactgccatctccagcaggggtctgaccctctcaacgtcccagacatcggagacagcagttaactgttcctggggtggttgggaggcttaaaagagtggctggcacaccgagcacagagcagggtgtttggcacatagtaagcactcaataaatggtagcttgtattattaccacccccatttcttgctgtacccccacccccaagaaagcactgaacattagtaaattttaatttgaaaataaaagaacacattttaaaactgccaaacagatttaaaataatattcattacacaaaattaaaatattctattaaagccagactttgggctcagaccaaatttttataacccaagcttaaaggccagggagtcccccagccacaatggggacattgtgattgaacttgagacttcaacgctgctattgagcagtctttgaaatgcatgtttcccctaaaataaaagggaagtaatgggaaggaaaaaaatgaggttcttgctcccctcaacaagccttaatgaattggaaaagaaaaacaaaatatttctcatttttctcctgctactcgatcctgccaaagacgcacggcccctcccaaccctggctttgaatggtgcccactcagaaccttccagatctgatatgctatatgagcaaacctaatctaagttgtaacattgtagtcttcaccaggttttacagatggcggattgtatcactgggaatccagaatggggagcccaaattcctaggttcaagtcctagttctgcctcagtttccctattcacaaaatagagacagtcctcctactgcataaagtggtggtgggagtctgaacggttagctctccccatggatgttttaatcttctgctgttacctaatgaatgaaacttgccctgagttctgggactttgaaaaattaaagtatacaggtatgcctctgagagttataaattaaaaaaaagtctattcagggaggagaatggaggagggaagaaggagacataaaaatggctcacaggagttattatgtgacagacactttcacaaagctcatttaatcctctcaaaaaaaaaaaatacatgatatacatgtgtccatttaacaaacatggaaactgagacttggacagatcgagtgactgcccagcggcattccattccaggtctgtgtgacccaaagcatgggcctgttgtaccacatgacccacagccctcctggaacaaggtcacaaacaatcatggtggactggagagactcccctgaccaaccagttatttatgatctattcttacatttcaatagcatccttcatcctcaatgagcctgagttgctgtggccttttaccccacattccattgagaaccagtagattttttcttgaacagcacatggaaaaagtaacgtaagtgggttgcaaaatccttttctggatgaaatccttcaagaatccctgccatttcttgccaaccggaatgaagtgacttcctcctcagaccaggccaggcccttggctatggtgtgggaccatgagacagagttgtctgaggctgggcagctcctggagagggtatggggtcccctctatcaccaacctgctgtgtgtcttcgggcagatcacaagagccctctgagccccaatctcctcatcagcccatggagcagacaccttctatataggatttgttatacgacttaaataaaatgacagtggaatacttagggtactgtggaattggacccattcccaggagtactcaaagaaaggggagaaaatgaaagttacttgccccaggcacattccttactgttcttcaggtagctaccgtttggggactttagacattctggaagaatctgttagtctctgaagggcagacttctttttaatgatgtgggcaccctttccacattaacttgaaatgtacatggacattttttttctttagagttctgtctctatcttattatgcatttggaaaagatataaaaagcatttgaaacaaatggttttacaattttttactgcttaagacaaaaatgatttaaaaaccaagtccatcaagtaattgatagcaaaagtggcacacagccatggcagagttcatgagggaagtttcagaaacacgaatctgatgatgtgaagctttccctgtgatctattcatttaaaataaaacattttagttttaaaactcatccccgcaggctgcgtacgacaaattccacccaaatacccagaaccttttactaaccagaattgcaatgctgtgctgctttcaggggaataaaatgaaacaaatgcagtctctcggggacattggtaaagtcatctcagagtacatcagtgtccgggcacatctagtctgtgtcttgtatctttgaaagaagaataactaacctttggatgactgtaatgttgataaaaaataatctctgagggctaactttatgccgggatatgttccgaaagattataggcattaactcatttattccttgcaataattctacgatgaaagtactgttactattcccagtttaagtgagaaaagtaagacacagagaggtcaagtgacttgttcaaggtcacccagcaagtgcaggggtagagccaggctttgtatgtgggagtatggttctagagtttgtcttcataacccctgacttccctgattctttaaccaccataaaaaattaaactctttgaccctcacttacttgcacaatgaattaattaaggacaggcatgagaaggggctgaaagcgatgttaaatctcagttataatttttcagtttcttacaaggatgtatttgcgtattccattatctttagggtacagtacactacagaagccagtctctccacgttcaaatccactgtctaccacttactagccttgggcttccttcacctctctcagcctcagtttccccattgatgacatgaaaataacggactctgcataacaaatgcattgaagaccacgagacacacacagtgattgttaaaagctattgattacctgtggaagaaaaattaagtctagaaatcatatcttcctacagggcacaaatgcagtttggtatagtttggagtgaaaaagaagggaaaaccgcctgagctgtgaggttcaagctggaaaatagctcaggtttttccagatgccttaagactgagccaaagagaccggctttccatgtctccacatgagaagttaccgagctaagtcctcaacaggcagcctacaagccattgatgttagaatctgtccaggtgaggaagcagcagcctgtgggagggtcttgcccatggccacatggccagtctgtggcagagtggggactccccaccctctttcaagacgagtgagggatcttgggtagcatgggtcagaggtggagaggaacacataaaaacaagcgtgaggccaggcgcagtggctcacacccgtaaccccagcgctttgggaagccaaggcaggcggattgcgtgaagtcagaagttcgagaccagcctggccaacatggtgaaatcccatgtctactaaaaataaaacaattagccaggtatggtggcccgcatctgtagtcccagctactggagaggctgaggcaggagagttgcttgagcccaggaggtggaggttgcagtgagccgagatggtgccactgccagcctgggtgacagagggagactccatctgaaaacaaacaaacaaacaaacaaacaaacaaagtgtgcctggagcgactgtctatgcaaactctgacatcagctctaggctctagtttcatgattttcattttatttcttgttcccttctttacattggggaaaatgtgtttttctctagaagcaactacctggttttcagtggcaaggtgcacagactttctgggttttccattcaccattctcctccactgtgcctcccgcttccatttcctcttcagtatggaaatggcacttatttattcattcattcaaaaatatgtattgagcacctgctgtgtgccaggccctactctggacgtggggaatgcagtcaagaacaaaaatgaccaaagtctccttccttgtggagccacagttaagtaggagagagaaaataaacacatatgtatataaggtacgcagaatatcaaatgataagtccatggagaaaaaaggtcaagagaagctgacgagaacatgcccaggggaggcgagaggaatgcagcgctgaaggaatgtaggagaacattctagaaagaagcggtagcaaggacaaaagtcctgaattgggagcagccagtgaacaaggagggcagggaagatgaggccagttctggtagggccttgctcagaatccagctgccgttctgcgtcaatcagtcatgtccagagtcaaaattatcgtaatttaaaaatgatttttcaaagtacatagagcctaaatctgaaatcaatgactgcaaccgcagatacccagagaacccaaacaggtaagaattagtggagtaggtatgctaatagcagggactccacccggtgccattcaggaatggtctccgtgttgctaggtgttctgatttttcaaaatctgaatttttaagagaaatgtcccgcttttaaaatcactatgaggaaccaccagaaatatacctccaggctcatagtgtacgatccctctcccaaacatcgacacagaccctgggaatcaaatttcagtgaaaaggcactaagcctctctcccgcactttttttttttttttttttttttttttttttttttttaccaattcctgaccagaaaggatgccaagagatgctaaaaattgtttccaggaaaaagtaggacttgaatctcatggggatgaggctgagacttcttccaaggagcaatcagcttgcttcattattatgtctttctcaggagtttttcctgatctccgctcatcatggggaaaggcaagatggtccaaatctatcctccttcgggttttcattagtttcttgatgatgattattatgtcatctggggttgatttaagagtggtgaaatgtttgcaggtctcataaatggttgtcagccactgtttagaatggcaaagaactttttatgttgttcccattgcaaggagtggggtgatagtttccaatggctacagacaaaagggggaaagtgggttctgaagccttttacaagaggagattggaaagttgagtaattcaatgggggtgcaggtgggaggcagtaaggaaagctccaggagctttttaagacctgagatgcctacattgacaatactgaaatcatcgtcggcctccccagccccaaagctgggcttaagcaaaatcccagccagtggtcgccttagctgtggagattgctccagatgtaagtgacaaaaaaacttacttctgagttggtttaagaaaaaagaaaatgtattgccttgggaaatgaaaagttcgaggagggctggtttcaggtacagctggttcaagagctcagatgcaggtcatgtgcccatctcttaatcagtctctctgttcaagaggattctgtactgtgccacctgtggagctgtggatggagtgagagaaaggtagatttccaaagtgaaatcggcagcattttctggaagtgtgggtggactggttccttatatcccccaaaattgtacctataggtatgccttctccacccctctcctcctggactacagtgctgcttatgaaatttgtgctttttccaggcacgatgttatactctttgtgtgcatgttttacttttctcctcaaacattcttactaggtcagtatttttaagacctgctactattctgccctccacatgctcttccccatgggcctggaagattatcttttatttcaagtaagggtgtttgtcttacttatttcaagtaaggatgttcatcttaagggtgggtcatctgtatttgtctgttcttgcactgctataaagaaatacctgagactgggtaatttgcaaagaaaagagttttaattggctcacagttccacaggctgtacaggaagcatgttactggcatctgctcagcttctggggaggccttaggaaacttacaatcatggtgggagacgaagaggaagcaggcacgacttacatggtggagcaagaggaagagagaaagaggcgggaggtgccacactgttgtaaacaaccaggtcttatgagaactctgtcacaagaacagcaccaaaggggaaaatccaatcccccttgatccaatcacctcctaccagaccccacctacaacactggagattccatttcaacatgagacttgggtgtggacacgcatccaaaccatcttatcatctcttttcatggtctctggtacaaaagttgaggcactccagccaagcataggacatgcgctgggcttcagaggataagtgagagatgaatcaggatcactaggagtagaagggttaccctggcaatgcacgcattcccaggcccctgatggtcagcctggatttctttttctgctctgagcttttgctcccgttgctgcctgtattgaactttctcatgctccatctaggggcatggcagtaacatcgggtacacacagaggttgcacactggcaatcaagatgtgttttgtttggtctgcagatcatttaaaaaatagaatggagccaactttgaagatctggatctttcacacaaaaatgtagattgctggctcccatcaaaacatcacaagatctgtcaacactgtgcccacatttccacattaccgcagttgactggggctgggaactgtctgtcccttttaggtggataagttagttcacccaagtcctcacctttccctatagtctctccaacaccgaggttcaggttagttaccatttaccgttgggaccatgctgttggctctcctagagtagatttaagacagaaaagaaatctttcctatatctagatctccattagaagtatgaaaatgaagtgtaaaccaaggtggtccttggtatttacaaaaaagagaaagcatctgtcttcaggtaacacagggtttctcaactttggcactattaagatttggagctggataatttgtgtgtgtgtgtgtgtgtgtgtgtgtgtgtccactctgtatactctaggatggcatttaatatgtccatgtggacatcatgcaccatctagaagtaaataggtccctgtgctccaggcgctcaccaccaggttggtacaaagagttaccataagtgaggaaagctgttcttctgcatggcacccgggcaggctcagcattggcagtagaggttatgagttggctgatttttgatttagtcctaagtggacttgccaaccattgaggctgtttatgactgcctgtttgagatgttatagaaggaattcagtgttgaatgagaggttaaactattttaaagagtctttggagaatttcttaactcttagctgagtgaggccatggtggatgctacttgcaaaaagtttgaaagtagcatggatggaactggaggacattatgttaagtgaaataagccagatgcagaaacacaaatatctcatgttcccacttgtgtgtgggaactggaaaactcgatctcgtggaggtaaagagtagaatgagggttcccagtggctggaaaggtgggggtgatgaagagaagctggctaatgggtagaaacatacagctacatagaaagaaaagttctagtgttcaaaagcacagtagggtgactgtagtcaacaatatgttctatatcaaaatagctggaagaaaagattgaaatgttcccaacacaaagcaatgttaaatgtttgaggtgacggatattctaaataccctgatttgatcatcacacattgtatgcatgtatcagaatatcacatggaccccccataaatacatacaattgttatgtatcaataaataatcttgcaaatagaaggtggagcatgggcagtggttgggcttgttggagagtgagcagaaggaccaaatgacctctggatgtctcttatgtctcctccagctctggttctgtgagctgaggcttagtgagtttcaaaatgttgcctactacatgttcgcaactgctaaccgtggtctaccatggaaactcaaaggcatggatattcagggaggaatctcatttttccctaggctagtactgtgtacgaggtgagacttttttttctttttggccttcccctagtgttacaaatcctgtcgagtgtctgaaataccatccatgtgaaggtttcccatgataactgtaacagctgccattcatccattcaacacatatttattgaacacttctatgaggcagccactgttccaggcacttggcaagcagctatgtacaaaactgacaagtccttgccctcatggagcttttgtttaggggggaaagaagatagacaataaaaaagcaaatagtaagacagtcttggcattgctatggggaaaaagtaagtagaggggagggaggttgatgggaaacattgaggtagaacagggaagaggaatttttaattttttttttttttctttttttttgagacggagtctcgctctgtcgcccaggccggactgcggactgcagtggcgcaatctcggctcactgcaagctccgcttcccgggttcacgccattctcctgcctcagcctcccgagtagctgggactacaggcgcccgccaccgcgcccggctaattttttgtatttttagtagagacggggtttcaccttgttagccaggatggtctcgatctcctgacctcatgatccacccgcctcggcctcccaaagtgctgggattacaggcgtgagccaccgcgcccggccttaattttaattttaaatagggtggccactgtgatggcatgctggtaaactggttctctggaaattaaaggtcctgatttgtagcctctgccacttacagtggtgtaaatactcccaccatggtcacttacagcccaacagtgattttaacaaggagttcacaacattcatgcacatttaacaattgtttcttgcaggctggtacaggctggctgcagcacatcactggcaggcaaggcctccctgaaactatctggcagaagagcccacacagaagctctgagtggggttgtgcctggtgtgttcaggaatgaccaggagttcattgtggctggagctgagtgagaggagaggggcaggagatgtagttagggaagtagccaggggcagataatgtagggtgtttgaggccagggtcagatttttgacttctaagctgagtgaggtgggagtccctggaggaatgggatctgagcagaggaaggacatgatctgccttaagtagagcagaactcctctggctgccaagagaacagactgcaggggtcagagggtggggcaggaaaaccgttaagagactgttcagacagggaggtgacggtgacttggaccagggtggtggcagtaggatcagggagaagagttggattctagatatgcttttaagatagagccgatagaatttgctgagggattggctctgggaagggatatgaagagaggagtccaaggtgactccaaggcctctgggctgggcatttgggaggatggagctgccctttgctgaaatggggacagtggagggaggagcaggttgggaaaggagatgggagcacctcgtgtggacctggcattgagccaggtgtttgaatatatgatcatctccttctgtccattttatcacgcccattttggaaaggatgtgacagagagttgaggttaatcagcatgcccaaggtggccctgctggtacatggccaggccaggcctcccacccctttaccactctgctgtcctactgtgttttcttggctttctcagtcccgttcctcctcttcgttttgaggaaatgacaacaggagaactctgcagaagaaaccacctaggagccgagacctctccctcgttcctaaagagctgtccagcggttaacgctggacacacatcaggtctgctcagtggatctgtcacccacatttttccctgacaaatttgttggattaacctcatgaagatgaatattccacagtagaactcacacttaaaaaaataggagtcagtggcataaaggctttgatttttctgtggacacaggcttaaatccagattctaccgcttgatggcttctccatgggagcctcagttttctcatctgtggagtgggtgtgtattactccattctcacactgccaataaagacatacccaactgggtaatttataaaggaaagaggtttcattggctcacaggtcagcatgtctggggaggcctcagaaaacttacaatcatggcggaaggggaagcaaacacatccttcttcatatggtggccggaaggaggagaatcagtgcccaggaaagggggaagcctcttataaaaccatcaaatcttgtgagaactaactcactattgtgagactaggatgggagaaaccacccccgtgattcaattatctccacctagtccctcccacgacacgtggggattatgggaactataattcaagatgagatttgggtggggacgcagccaaaccgtatcagggagtaagaagagttcctctctcagattcaaggagataatgggctgaggcacttagcactgtgccagccccatcgtcacactcagcacacagagggaatcatgaccatgattgtttgagagagggaattagaaagttgggttcagttttaggcaaaagctgacctgccttcaaagctggagtatggggacagggggccgtgcgtgggacatcgtgcttgagagctttgcagtttggccttttcttttctctaccggagatgggaggcctctgtccgtgtttctgctgtgttcaccaggaggccagtctggggcaattactgctccccatctcccaaaggagccacatcagcctcatagcagtgtctctagcttcgagctgttgcctgtggcaggcagaacagtgtgtactcgcaacaagcaaatccccagatgtgagcccattcggggctgccacgttttttcctgatgaaattcctgacttggtgtgttgtgtttttttaaaaaacacgcccactgcctccaaaaacctcagccggggaagagaaacatttctcgttgaattcccagtttttgaaacggtgtcaaattatgcccctctcatggcctggatacgccattctttccacttagtgcttttcagagaggcctgggtggcagaacgtggatgttatctaggccagcctttgcattatacaggtggggaaactgaggctcagacaggccaaggaggagccccacatgggaagttggtctcagagccttggtgatacccccagatctcttgattccaggcccactttcttccttcttcatcagaggtcacaaatgggcaggctgcagccacctctaccctacagatgtgctttctttggcctgagattgttttgatttgaatgagttgccggcatttaaaaattaggagattccatataaaaacccagatttctggcttctctggggccattgggagatctgccaaatgagctgtgcattcctgcatggtgacaattgagggtctcagtcatggccactccctttagccagagcatgtcttcatcagttcaccacagtccccgcccctccctctagtacccccggacctgggggctcaatgtcacttgtcatcatggcgctttccctcccagttctataggggtgcagttaagagaaaagtgaagtatttcttgaaactgtgtctctatcaaaaagaaggaaacaaaagatcaaccgaaatgaccacttgtttaaacattaatagtacatagcatgattgctttgtggcagagcaaaaaatttctatgaatttcatatgcaaagagaatacgtcagtgttgaaaatcgctggccccttcactctctgaggttaccttccccttctctgccagtgttacacttgccatccctgcgtgccaaggccatagtttccacttatttttttaaggcagcattaaacttatttgacctacatctgcccccctcctgtgaaacttgaaatgctattaaaccaaattaagaagtttttaaaagttgaaatggtctttaactgctcgagaaagggtgtatgtgaatatgtgaatgtattgtgcagtgtgtgtgggtgtgcatggacaagtatgctgtgtgtgagtatatgaatgtgggtgagtgtgtcagagtctgtgtgaatatgtgtaggtgcttaagtgtgtgagtttgtgtgtgtgtgtatctgagtatgaaggtattatgtgtgtgtgcatgtgtgatgggttcttgatttatagactttgcaccaagtagaattggacaaaagtgtttttctttggctctgggactggcacttctgggctttaccatacatttaagccaaggtgcaaagccaagttggttttaactctaatgccacgtcagtgagctgggttgagattgaggttaaggttgactttcctttcttctgggatatagtggggggcttttggaggggagagctcggggtgctaggctttacaaatgatgctcactttcttcccagagcagatggccagaagagagggggctcacactttgaggcctgctgtgtgccagacattcatatgaagattatctctctactgttcgaagtgagctttggacccttccttatttactgatgtgttcattttggttctgttaggaaaaatatatagagagataacctataaaatacataaattagtagtatttcttagaacaaggctcagtttatttaaggaggaaaaagagttcatttaaagaaaaaatatgttaaatgatatagtttgtggaggtgagaaaatcacaaataattgatccttaccatgtgcaggagtggtcaggtgggcagcctccccccgagtcaaaatcttcctaacatcttgtacttcctcaaagcacttaaacttgttaaatacttaatcgtatatgcttttgcataattttgtctcttttcaactaggactgtttatgtcatttcaaggttgcctttccagcatctagcagagtgccaggcacgcaggaagtgctcaggaaatagcagcgaatgcatgcacagactccctgccaagaggggaattactgtccccattttatagatgaggaaactgagggtcagagtgacttgcttaagatttggcaactaggatatggcaaaacgaagatttgaacgcatgactctcaggctgcacaaacctttttgccaaacaccaatacgtgggactcaggtcagacagactatgaccactggcccattgcaaaatgaggaaagcgaagtggatgtgaagagtttcataaagctacaggcattccttggagatgctgcggggttggttccagaacgccacaataaagccaatatcgcagtaaagcaagtcacgtgaattttttggtttcccagtatgtatgaaagttatgtttacactattactgtacataggccactaagtgtgcaatattattatgtctaaaagaatgtatgtaccttaacttaaaaatacttcattgctaaaaaacgctaatgatcgtctgagcctttagcgagttgtagtctttttgctggtggagggtcttgccccattgttgaaggctgctcactgatcagggcggtggttgctgaaggctggggtggctgtggcaatctcttaaaataagacaaacatgaagtttgctgcattgatgaatccattctcttccttttatgaaacatttctctgtagcatgcaatgctgttttatagcattttacccaaagcagaacatctttcaaaattagagtcagttctcggctgggcgtggtggctcacgcccacaatcccagcactttgggaagccgaggtgggcggatcctgaggtcaggagatcgagaccatcctggctaacacgctgaatccccatctctactaaaaaatacaaaaaattagccgggcgtggtggcaggtgcctgtagtcccagctactcaggaggctgaggcaggagaatggcgtgaacccaggaggcggagcttgcagtgagccgagatcgcgccagtgcactccagcctgggcgacagagcaagactccgtctcaaaaaacaaaacaaatctcactctgtagcccaagctgatgtgcaatggcacgatctcggctcactgcaacctctacctctggggctcaagcaattctcatgcctcagcctcccgagtaactgggactacaggcacatgtcaccacgcccggctattttttttagtttagtagagacgggtttcaccaggttacccagagtggtctcgaactcccgcactcaggcgatccatccaccttggcctcccaaagtgctgggatacagacgtgagccaccagcacctggcctatttccaccacatccgcagtgacttcctccactgaaatcttgaacctctcaaagtcattgatgagggccagaatcaacttcttccaaactcctgctaatattgatatttttacctcctcctgtgaatcacgaatgtccctaatggcatcttagaatggtgaatcttttctagaaggttttcaatttactttgcccaaatctatcagaggaatcatgacctatgacagctatggccttatgaaatgcatttcttaaataataaaatttgaaagtcaaaattactccttgatccatgggctgcagaatggatgctgtgttagtgggcgtgaagacaacatttatctccttgtatatctccatgagagctcttgggtgaccacgtggactgttgtgagcagtattattttaaaagaaacctttttatctgagcagcaggtctcaacagtgagcctaaaatgttcagcaaaccatgctgtaagcagacatgctgtcatcccggctttatgttattctgttcatagagcacaggcagagtagatttaacatcattcttaagggtcctaggattttcagaatggtaaatgagcattggcttcaacttaaagttatcagctgcattggcccttaacaagagattcagcctgtcgtttgaggctgtgaagtcaaccattgacttctcctctctagctatgaaagccctagatgggatcttcttccaatcgaatgctgttttgtctgcattaagaatatattgcttagtgtagccaccttcatcactgatcccagctagatcttctggataacttgctgcagtttgtccatcagcacttgctgcttcgccttgcacttttatgttataaagatggctgctttccttaaacctcctgaactcttggtagcttcaaacttttcttctgcagcttcctcatttctctcagctttcatagaattgaagagagttagggccttgccctggattagcctttggtgtatgggaatgttgtggttggtttgatcttctatccagaccactcagactttctctgtatcagcaataagactgttttgctttcttatcactcgtgtgttcacgggagtagcacttttaatttccttcaaaaatttttcctttgcattcacaacttggctaaacatttgttgcaagaggcctagctttcatcctgtctcagctttcgacatgccttcctcactaagcttaatcgtttctagcttttgatttaaagtgaaagccatgcgactcttcctttcacttgagcactcagaggccattgttggattgtggattggcccagtttcagtactcttgtgtttcacggaatggggaggcctgagcagagggagagaggtaggggaacagttggttgaggtcagaacacatggaacatttatacattaagttcaccatcttatatgggcacagtttgtggtgcccaaatcaattatgaataatatcaaagatcactgatcacagatctccataacagatataatagcaatgaaaaaactttgaaatattgagagaattaccaaactgtgacacagagacatgaaaatgacactgataaacttgctcaatgtaggattgccacaaaactttaatttgtttaaaaaaaaaaacagtatctgcaaagtacaataaagcaaagcaataaaacgaggtcttcctgtatttgctttattgcggtgatctggaaccaagcccacgatatctccaaggtgtgcccgtatactgttccaatttaaaaaatggtctgttatttttattttcttcctattttgaggacgtgacacgttatctttttatgactaaaatttctcattttttgtttttaaatgtttcactggacaaatcaaaatggcagcctccttttgtgggttctcccagtttttttctttgtattgctttttttcgggagggagattttctagttggtggaatcccagagtctgagaatcatcagacaacttcaagctcctctggagatcttatcaggtccattggggaaatctctgagctcccctctgacttctttccaagtcacttcaccatttccccttcatggggtggggccagtgtgtctccctcattccaggccccagggacacaaatgcaaaaaccagagccacatctcaaggatgtgtcctgggacctctccagagggccagagcctgcccttactgattttccagggagctcaggactcatcatctctctgggagaaactggtgccacccaggatggccttggttagtacggcatctcttcatgggctctgctcacctcttttggtttcagcacaatgcagctttcctttccattttcttaaccaattcagatgcccctcatctaactgctaatcatagctccctgttgagcgaggtgtcacctctgaaagtctgcccattgttgaccctgcggtctcttcttccaggcttggaggctgggtagatgccatttctctaaccctgccagaactctagctgtgcccacacctccgctggctcttagtaggggcgccttctcagtggggaggctgacacagggctgtggagacttggagccagcaatgcgccggccctcgcctcagagagcttggagcctcgtaggtgagaccaggcaagcacagatgtttccttgggactggattctaggccctgttgagggctggagggtaacctcttaggcttgcatagtatattacagtttacaaacagtctccacatttattttcctcatgtccatttgtagtcctctgcagtacgtgatgcttatcttgcccagctggcatccattcatctcctggttttcttttctttcttctcctttctcgtttctactgcaccttcaggccattaccccactctccagttctaagtgcagacctgtgacctccccatgggcagtcacaacatgctatgcctctgccctcagggttcaggcacaggaactggacccaggttgaatggggcccaattctgggaactttgctggaattgttgaggaatgatgccctcttttctctgggttgctaaactcatagaatgtagccatcttgcttaggggaagcctgcctgaaactaaaggcaactcaaaggaagacagagacaagatatggagggcaaaagattcccaatgacctcatttgagcacctggatccagctgttcctgaagctagataccatgtgttattcccttatattagccaatacattatttcttttttacttaaagaagtttgaatggagtcttctcccaattgctataaactaatacaggtggttttgcatttactaagttgccctgcttcctctgatcacagtaaaactccctttcatgtatgaaaccctcttgtaagtgttttcatagcaatcagactcatgtctactagacacagcactggcctaatttcagtgaagagggatttgaggcacagaagagaagggaagcaagttgaggctggaacctgcgtttcctaacacctgttctagtgcattttccacttggagcatcctcaccagctttcagtttggagaacagtttttaatacccaggacatcatcaccccggaggacaggagtgctaattgatttaatgaacaacccaagcaaggtcagagaaaactcttaactacatcacagagtaatcagaagagttacactaatggtaattttaggtgcctagaaaatctctggtagataagagaggaaatagttaactgtagttacccaggggaaaggaaatggggaaaaggagattcttagttttttactgtgtatactctactgtacattccaaaatgttttactaggggcaccgattgtttcatattcaagtaaacagtgaattttgaaatgtaacaacagcaggcttccatctgagacaattagagcatcaaatagtgaattataaaccattgaaaaaatacaaacctatgaatatataccactaataaataggtaaataagtaaatagggaggagggaggttttgtgcttacagtcgaatgccgaggaccagctagaattgtgggggagagctgggtaagaaacacaccatgttgcgaccactataataaagattggttcagtcaagaatcatcatcaatagatgctgaatttggggtggggatgttgataaggagtagcattttgcatggtcttaagtgatctcttcacgatggcttataaattttaagagaaaataatagtcactatgcagtgcagaaattggtgatctgtatcaatgtcatcactgagaggcagatagacaggatgtccggagaaggacgcagcatcacccatgcagtattctgggagggtgcatgacccgaatctaataagaaaagagcagacaaacctagaatgaggaacattccatttcaaaaaaaggtaccttcttcttcaaaaatgccgatgttgcaaagtacagaaaaagactgaagaaatgttctagatgaggccgggcacggtggctagtgcctgtaatccaagcactttgggaggctgaggcgggcggatcacttgaggccaggagtttgaaaccagcctgggcaacatggtgaaaccctgtctctactaaaaatacaaattagccaggcgtggtggcagacacctgtaataccagctactcagaggctgagacatgagaattgcttgaacctgggaggcagaggttgcagtgagccaagatcgtgccactgcactccagcctgggtgacagagtgagactctgacttaaaaaacaaacaaaagaaatgttctagaccaaaggaatctgaagggataggacaactaaatacagtacccagttctagactggattctagatagagggggagatgtgatacaggaaattattggtgaattgacaaattgtactgtggagaatggattggttaaaatattgtgtcagtgttaaagtgattgaagtgggtaataaaccggagattctataagagaatgttatttttcttgggaaataccattggaatatttacgagtaaaaggccattatgcatgtaactctgaaatgatgcacaaaagaaaaataatacacgtgtgctgggtgtgtgtgtgtgtgtggagagagagagagggaattggtaagcacatgggtgaaacattaacagcagatgcatctgggtaaaagatctgtgagtattctttgtactgccatcacataggtcagcctctctccaaaacctgcactcttgtttactaaaacagtatttctcaaaacatggaacgccttagtgattttttttaaatctcattttgctaactttcagctcttttaattaagcccaaaagagaatcttaagttggtgctggatggtttggtttttaacaccaaacacttgctaattctctttgtataacaaagagagtcatcaggcaagcagtggcctctagaaagatctatctttcatgggggattcctcatattaatttttctagttatcttctattttttgacagtgatttatatttgtgatttttaaaagttcctttttaggtatattaatttaagtttatttttaacttgttttaggaagtgagtcaattcaaagaaaatattaaggtggtgacagtgcacggtatgggtggcacatggagatggcagaggctgggaaggactaaagtttcagccactgcagctggaaactcctctcaagtttaaaatgtttgggtcaaggtgacactttcccgtctgtggtccctgctttcttaacactatcattcagaaaggccccaagtgtaggccgggcacgctggctcacgcctgtaatcccagcactttgggaggccgaggtgggtggatcgcgaggtcaggagatcgagaccatcctggctaacacggtgaaaacccatctgtactaaaaatacaaaaaattagccaggcgtggtggcgggcgcctgtagtcccagctactcaggaggctgaggcaggagaatggcgtgaacccaggaggcggagcttgcagtgagccgaaatcgcgccactgcactccagcctggccaatagagcgagactccatctcaaaaaaaaaaaaaaaaaaaaaaaagccccaagtgggtaattcctttcctctaaggcagtaaccagaataaacccttctctatcaccaatgcatgatgcttccattatgtttcacctccctaatcttcagaacttggaagaatgagtttggtaatgttagactggaaactcagaccaaggaggctgtgttagtttcctgggactgatgtaaaaaagtacagcaaacttggtgactttaaacaacagaaatttactctctccggaggtggaagtctccagagagcctgcaaggtgttagcagagccgttctccctgagcctaggtagaattcttcctcacctcctcctggctttggtggtggccatccgtccttggcattctttggcttgtagccatgtcaccccaatctctgcctctgtcatcacatggccttgtccctgtatgtcttcatgcagctttttataaggacaccagtcacattggattgaggacccatataactccaatatgacctcatcttaactaatcacatccacaatgaccctatttccaaataaggccagagggtgacaactttaatatgtcctttggcggaacacaattcaatccatagcagaagtttactcaagcactcaagggctaggaaagaaaagattcatgactggccctatgtaaaaataaaacacctcagcataatgcaaataccatatgcaaaatcaaaagataaatgacaaactgggggaaatctttgcagttcatatgacaaaaaaagaggctggtttctccggcataggaaagagagttcctagaaattgatcagaaaacagtaacaataatccattagagaaatggatggaaggtatgaacaggcaattcacaggaaaggaaatacaaatgacttttaaatatttgaaaatatgttcgatctcacttaaaaaagagatatgcaattaaaatccacccataaaatcgagaacaatttcaaagtttatgaacatactctgctggtgaggctgtggggaaacagacactctcatctattgttaggaggagtgtgtgtcactacggtccttttggagggcagattggcgtggcccatccagattacaagtgcaccctcctttaatctagcaatctgttcctaggaatttactgcaattgtatgtgtgcaaagtagcacttgtaactcagtgtttattgcagccttatttgtaacagcagaagtttgggaactgtccaggtgctcacagataatagagaattggtcacataacttggtatctccatgcaatggaaaattatgcagctgtaaaacaaaatgaccatactttccaggcaccaatttgataaaaacccctggaaaaatattactgaaaggaggtaatatagcatgctactattcgtttaagaagcaagtgcggagtgaataagaatatacatccacatttgcttctgtttacataaagaaaatttgaaaggctacgcaagaaattaattattaggactaattaactattaattaggatttttccagagaaacagaaaaaaataggaaatatatacgtacacacatacagtgatatagagaggggggttgatttattataaaggattggttcatgcagtcattcaattatggaggctgagaaatctcatgatctgccatttgcaacctggagacccaggcaagccagtggtgtaattctgtcccatttcaaagacctgagaaccaaagaaactaatggtatcaatcacagttcaagggcaggggaagatgagatgagatgtcccagttcaagcaatgagacaggaaaagaagggagaaattccttcttcttcttccttttgttctgttcatgtcctcagtggattggatggtgcccacccactttggggagggccatgtactttactgagtccactgattcaaattctcatctcatccagaaacaccctcacagggatacctagaaataatgtttcatctgggcaccctgtggccaatcaagctgacatgtaaaattaaccatcacactaatgaaagtggctgtggagggtggtagggatagaaatgagacttttccactatatctctttataattttaatttttgaattatgtgactgccgtgcctaattaaaaataaatgcaacaccttgggtgtgggagcagagttgccgtgggctcactggttgctgcacacgttgctctgcatgtcctgggttccttttcctctggttgctccttcttagttattctgggggaaagcaggtgccatggggtacctgagactaataaataaatgcaggtcagcttgtggcccacagaggatggcccagcaggcatggggtgctgtgtcatgggcaaggacatgggccattcttcagtggcagtcattttccttgatgggagcccagaagtgctttgggaaggtagcctcgtgctgggcgtgtctgccctaagttgagtttaccaacacataggaaggtctgaaattcatttcagcacaagagcagaactgaccctgtgtgcttacattggaaatcacagatgccccttccctcagtcaggaaaattacccaggtcacctctggtgagcagaaggccttgcagaacaagtgctcagtggacagtgtgacatatgagccccgccgggatctcccgctgcagcagcgaggaagtagtgtggtgcagtggttacgtgttgcagtttcagagctgagttcacagcatggctgtattaatctgttctcacgctgctaataaatacatacctgagactaggtaatttataaagaaaaagaggtttaatggactcacagttccatgtgactggggaggcctcacaatcatggcagaaggcaaaagggcacatcttacatggcggcatgcaagagagaatgagagccaatcaaaaggggaaaccccttataaaactatcagatctcgtgagacttattcactaccacgagaacagtatggaggaaatcacccagatgattcaactatctcccactgggcccctcctacaacacgtgggaattatgggagctacagttcaagatgagatttgggtggggacacagccaaaccatatcaatgccctgccctcttactaaacgtgtgaccttgggcaggtcactcagctctttaaccctataggttttgtcacctataaaatacgagtcgctagtacctgtctccaaaggtgtatgaggatcgggtgaggtaatgcagtgaagtgcacatagtaaccctaaccgtgacccgaatcaatagaacacttagaattatcacaaacaataataacagataatactcatgtagcatttactatgctgcagacactgttttaagctctccaactatatttactctccctgcaactctgtgaagtaggtattgtaattattctcactttacaagtgaggaacagagacataaagggtaaatgtcttgccctacattactcagctctgcactggaggaggtgggatttgaacctaggtggtctggctcagagactgcttttactgacttcatcactgtgttcagtgagttccaggacgtgagtttgaataaatggaaaaatgggaacctgaaaccctcagcaaagtctgctgtgagcatgtgtctctgatctttcaagtactgctttggccactcttaagcttcgtgaaccttattttcctcatacataaatgggaggagagtagtaatgacatctactatttattaatcacctgctgagcatcagaggctgtgatgagtgccttacaggtctcattttttcctcactggagccctataagataagtactgttttccccattttatagacaaagagactgaggttcagagaggcccagaaatcttaggcagccagtaaatgccagaaacagaagttgaagccaagtctgtttgatgccagagcctgggcccatcaccaccccctggactctgtgccctccgggagctgttgcaaagatgagagttatttttctgtgtggtgcctggcacacagtgccggtgtgcaaaatcaccaacgcttggattgtcgatgtaacatttgctcacggaaagctgacctcacccatgttgaagctccctttcctcatctgctgagtcaggatgcagatggggtggctttcagggactgctatacagacagagttctagaaggttgtgtggcccggaagcggtgctgtgccgatgttaggggcctctacctctgaactacaagcaaattctcccctccaacaagagcacattgtgttctggccccggtctcccactaaggctactttaaatgcagatccttctgccaacagctacttttagcaagggcagactatcataaggagagaaacttgcaagaaaatagcaaaatggaagcattgttcccgagggtttggagcaggctcagggaacggtggggtgggagagccctggagacgtgctttgccatcacaaataagttgtgcaaaaaaaaaaaaaaaaaaaagaagaaaagaaaattcacttaaagtttttcctgaaacctggaaggaggagagggcagacaaaactaactttggaaggatttaaactgctatagtcctgtggaagcttctctgaaggaactgggaactgtttatagcaggagaattgcatcttgaggctggagggagcacagggctattgatggatgagtccctagtaacacgggaagatgggaggcaggagaaaaagcttgtggactgagaaggggctttttttttgaggaaatttgtgttctcagggatgaactagggccatatgataaaagattgcaaggatggtttcaacttcacaccatttagagcctctggcactatgaggaggttggctcatgcagtagtgagtggactgtcctcagaagcatgcaagcagagcccgggtgatgatacagggagtccagctttaagataggacacaggacttgagcagaggctcataaacactgggccttgtgcagggtccgctctgtgccagctctcacactcatccatgatgaaatgagagcaaagaggactgaggctgggtgcggtggctcacatctgtaatcctagtgcattgagagaccgaggtgagaggattgtttgagcccagcctggccaacatagtgagacactgtctcttaaaaaaaaaaaaattgagtagtgagattttaatccaagaagactgttccttgagactacacccttcctaaacttaggtgttcaaatgctctttataaaatgacccctctgtaaaagcctggaaatattgggattagataatgtccaagtcttttccattgctaagattttgtgattctaggaaaatatgtttctgatttggatgaaacagaataggaggagcgtaaaagcaagcctaaaactgacacatcaagaaatggccatgtcagcataccagttagagatgcagagttacttaccaggaggaacagttacaagttgactgtggtcctcctgaagaacagggctggaggtgagattttgcataagtatcaattctgcattggtatataaattttaaaatgacatgcatgtactatatgacctttggttaacactaaaacttttaaaaaataaaagacaggtaataattatagctgccctttactggattctgtgctaaaggctttttataatattatttcctttaattaatcccatcttagggatgaggaaacaggctcagaaaggtgaagttacttactttgctgtgcagacagggtgaatttcaggtttttttgacgtgagaatccaaaccagatgcatatacacgaagctcagttgtcctctgccagggtgagacttctgtggggcttcaggagaggaagaggatggggggatgtgggggtaatgctatagaaagcaccagaagataactggaagagagatgatgacaaaaaagggggtcctggttaggtttcttgatcaaacatcttgaggaattcagcagcttgtcataaactaaaaaaaggcacacttgcacattaaaagagaaataattaaacagttgcatgagacacttatgttcctttctcccctcaatttggatttgatgggagggaggccacatgggaggaagcaagctgtttggacgcgttgactctgtgccaggcactgtgccaggaaccttatggaaatatcagcccatctagtcttcgccatgactctgagaaataatattaaccaagaacgtcacttaggaatgcctaccgtagggtctctcagcttcagccctgctgatatttgggaacagatcattatctgttgtgggaggctggcacccattaggtgccagtgtgataaccgaaaacgtctccacacattgtcaggtgccctcagggagtcaaactcacctccaattgagaaccactgtcctcagatgactaggcatgtcatatatattatcttgagtcaccctgccagctagctgtcatgatgcccactttgtaaatgaagacactgaggctgagagaaggctgacatcattgtcagtagcagggctaagaactgtgccacgtgttttcaatactgaatttagagaagcagcaaatgaagaccccggcccagttaaccttgggctaacactaaaatatagattgtatcttctcttttttaaccacagtgaatgtcttagaggaggggctggtgtttcattatgttttgtttgtttgtttgtttgttgtttttaagtacgctggcgacatggcacaggctctggaaccaagcaccttcacttattatctctgaaaccctggcatgttacttaacctctttggctctcagttttcttctctgtaaaatggaactaatgattatacctcctcatagggttgtttggggatgaaatgagatcacgtgagcgaagcagtgcctggcagatagagactcagcatcaacaaatgtgagctgtcattcttacgagcaagtttttaaatccatttcacatactcagacctggaagtggccccagtggcatcattcagggcaccatctctggggtggctgactctgcttctttgcagtcaagcccaggggttgtaattcatgtcggattttcgctgaccactgagcaatcccctctgggctgcaggagtagccggatttggcttgagcgtccagaggagaagccgtccaagctgatcaagcatttgccttctccaccaataggagtctcaggagaattatggaactgtctttgcacatggaagagattaattcgtgtggccacaaatagcttgaacactgtgtcctcagcgctgtgatctagtatcccctgaaatttacacagggtgccagcccggcagccagaaaagccacaggaccgtcttaagctgcccagcgctcctagccgggggacccctcaggaatttcagagggtggggacaagattaagtcgtttgtttttcatttcatccacctacctcgccccccgcctaataagcctgctttctggcctcccgtttatcagccaaatggaatgattgtgcaccccccatccccgggtttgcacctccaggctcagtccgtctacttcctccacctggcgtaccctcttttatggtcatgctcaccttccagtctctgcatagctaaatgccaccatcctccaagcctagtgccaccacctctgctccccccaccaagtggtacatggctttaaaggatgtgggctctggaatagagtttaaaccccagctctgttagatgtaggtgaggggtgatatggtttggctttgtgtccccacccaaatctcatcttgaattgtaattcccatgtgccaagggagggacctggtgggaggtgattggatcttgggggcattttctcccatgctggtctggtgatagtgagtgagtgttcatgagagctgatgctgttaaagtgtttggcactggccaggtgcggtggctcaagcctgtaatcccggcactttgggaggcggaggtgggtgaatcatctgaggtcaggagttcgagaccagcctggccaatgtggcgaaaccctgtctctagtaaaaatacaaaaaaaatcagccaggcgtggtggcgggtgcctgtattcctagctacgtggatggctgaggcaggagaatcgcttgaacccaggaggcagaggttgcagtgagccgagatcgagccactgcactccagctgagcaacagagtgagcctctgtctcaaaaaatattaaaaaataaagtgtttggcagtctccctcaccacgaccaccccctctctgtcctgccactgtgtaagatgtgtcttgcttcccctttcccttccaacatgattgtgtttcctgaggcctccccagccacgcagaactgtgagtcaattaaacctcctttatttataaattactgtctcaggtatatctttatagctgtgtgagaacagactaatacaaggggcttactttcctgtgaacctcagtttttgcccctataggtggaatactaatggctgattaattcctgcctcatcagatcatttgagatttaaaccagaaaaggcagactaggtgcttggctccctgctgagaacgtagtaaggactccctcgatgtgagctcagggcaggtcaggcaggtagctggcctagacagctggggcaggaggagaacatccgtgcaaagaggctagaggccctcagcagcagcgtggtggcagctgttggatcggctggccacacttccacagatctggcccataaggagacaacactccagatggatgtaggtgggttcttacttcacagtgggcaagatcaggttggtgttggctcccacatcctagtcccacagggtgaccccaaactggaagggccagacaacagatggcatcagtggtgggtcactctgttattgaggaagcaactctggacacagctaagtggttttgtagtcttcatctgtaccaaagtggggcaagatggaaagcgccaagtctcactagaacgagggaggccgatgagaaatgaccgtgctacagctcctcacaggactgctgtcttgcagcaccccacgcaggatcctagggccttccgtcaagatttgggttggactgtgctttagtcttgcctatggggcttttgcagaaatacacaaggtcaccggggcccagagagtaatgagagaggcaggaagacatttgtgctcacctagaacagtgcctggcacattgtatatgctcaattaaaaagtgttggatgaatgaatgaatttaccccacagtatttaacaaacccctgcctggagcaggccctgttctggttgctgggaatttggagataagtgaggcttagcccatgctctcaagacctcacgtgacagtgccagagatgcttcaactgatcattagcaaagtgttctgagatctctgaaaaagctaagcatggctcggaggcactgacagtggagtgtctgcatttatgagagcattttgggtggcaattggcagaaatgtcaaagccgttgaaacaaacaaaagaaagagacttaattggctcatgaaactgaaatgctacctgcaggcatggctgtatccaggcactcaaacaacatcaacatagtctctctctctcaccccgtccccactcacccatgtctcttggctctgttttcctctgtgtcaccttcctcctggccagcttccttgtcgtggtggtccccagcccttctaggtgttcatcatcctgaggactggcagtggcagcagaaagagggctcctctttcccagtagctctcccagaattcaaggattgactcaaactagcccagttaggtcgtgggcacatccctccacaaatagcactgtgggacgcgaaagtgatcagctccatccaaaggatgtggagggagggtgaagcgggagaggctctccaagggaaagtgaggatgctgctagggaagaggaggtggatgctgggcaggtacagacaacagatgtccactagatccacctagaagaccgttcattcaaacttgattatgtgcactgggtggaaatttattggatgggacaggggaaatagaatgggaggaagggaatctctggcagagagaacagcatgagcaaaggcccagagggagagaagtggatcacaaggaattggaccaggagatgggtaggtggttgaggttggaggattgagcagaggccagatgattgaaatccttgaatgtcaagtgattcaaagaggaaagagctatggttagatttgcatttttaaattcattcatccaacacatatttactgagcaactactatgtgaataagcaaagtccctgattatattctaatcataccctagggtagtgctaggaagcaagactggagacgctgagtctggaggcagggagagggaggaggttgcgcaccagtctagacgggagtggctaagacttagctggggcgtggagcacatttcccctgcatcagctctactcagggccaaacctttgctatgtagagtgagtgcaggaagcagatctccaggctcttgtgtgatgctccaccagggcagcctgctgggaacatttttgtagcatctgtttgcacaggctgtcaccaacagaattagcctagatttgaatccttgctgtcccatgcactggctgtgtgacctgccgcacctctctgggcctcagtctcctctgttaaatgactttgtgctggcacctactttgcagagttgtcatgacgattaaatgggatagtgtttggcgcctaagaagtgctcaataaatgacgatgttattaattactattgttactgtgactgtcttcaagggacatccactcctgaaactcatcttcctctcttggaaactgggcaccatgatagcaagtgccttagtggaatggtaatccacttagtggccatgtgaccttgtgcacatgacgtcacctctctgtgccttggactcctcatgggaaaaaatggggctaatattagtacctgcttacagggctgttatatgaattaaataaatcatggtaagtcctgaggagagttcctggcacgtagtaaactctcaataaatgtcaaataaataattattattatgtatttgtaatattatgttgcaatagttcgttatattaatataatatgttataataacatagattatattatattgcaacatcataataataagtattattattcggtagtagtagtttagattgaccatctgcaatctgaaaatctgaaatgcaaaatactccaaaatctgaaactttttgagtgctgacatgcggctcaagggcagtgctcacgggagcattttggattttggattttcagattcagagtgctcaactgctgagtgtatatataatgcaaatattccaaagtctgaaaaagtctgaaatcctaaacacttccagtcccatgcatttgggataagggctggtcagcctatagtatgttattaacaaggaggggttaatgatgacatttaaaaaaagccttattaggccaggtgcagtggttcacgcctataatcccagcacttgggaggcctaggcaggcagatcgcctgaggccaggagttcaagaccatcctggttaacatggcaaaaccctgcctgtactaaaaatacaaaaattagctgggtgtggtggcacacgcttgtagtcccagctactcggaaggctgacgcaggaaaatcgcttgaacccgggaggcagaggttgcagtgggccaacatcacgccatggccctccagcttgggtgacagagcaagaatccgtctcaataaaaataaatgaataaatagcccttattaaatggctgttctcagaatcatcatcattatccattagacacttagagggaaaatgactgcatttgggtttggggataaaagggccaccatttcctcccacaaaggcaggtgtctttctctcagaacacgtggttattaaatattgctgttattaatattgtgaaacgacatcagactcaaacccttctcccagcagaacaggagaaggaggctggctcccctcccctgatctgtttctcctaggctgaccggaggggtgtcccgtcccccgctttccctcgacggttctgtaactccccagaaggccatcccagctggcactttagttttgcgattcggggatttcttttctgcctcatgcctggaataatttgtggctccatttacaagagcagagcccttgtgttcaagcccgctcgggtcccagaagcagtgatgcctggaaagcagtttggaaaggtcagctcggggcgcagtccaaagtgattttaagtgccccagctaagtgccggccagaatggggagcgcttttaatctataagccttgccctgtgaagaaagagacaacactgctctgaagcagtttgactgcaaagtaataaatccctttgtgtatataaaaagtacagacgtatctagctcacatttcagaagaaaaaaaaatctctgcagttagggcattggagttgaactcatgtacatgaatctatgggaggaacttcatcgagaaaaaggagtttataatcgtcatacatttttaatttacaaggatttgttctgagactgcctgagatcacagtttcctaagctgtgtgtccttgagccagttgcttcacttctctgtgtctcatctgtatagtgggaagagtgagtactcacttttgggttgttgtaaaaattaaatgaattactagctgtaatgcatttaggatagtgcctggaacagtgtacacacttaataagggttagttactattatcttatagtacagatttttgttttaggattggcggcgattttctgcctggcacacaggaaagccagtctacagagtggccctgttgtttgcaacagaaacctataattgtctgtttctccttggttttctgggttgagagtccaatgcacacatttcatcatgccttgatttttttttttttttttttgtcctttttaaatccaacctttcaggacgtacttccagcaaggcaatttggaattcttgaattccagagagacctttccggccacattagctaacagaggaacttttcaaaaccaagagaagcttgcaaaccactggttagaaaatcaactcattcattcattcattctacaaatatttcttgtgggcttactatttgccaggtctgcgtgccaggctcaggggtttcaaagagagcatggcatattaaaggtgtatcctatggggagccaggccctgatttaagagctgtgtatacatcaatccactcaccacaatcctatgagatcgatcttatcttatccccattgcacagacgcagaaactgaggcaaagagaggttaagtatccctaaggacacacagctggtaaataaagtccagattcaaatcgaggcagctcagctccaaaatttgtactcttctctttttctccccagctctttaatttggaaaatttcaaacctacagaaaatgtaccagtatggcacagtgaacatcatatatttgtgccattgacgtagtcattgtttaaagcttcccacattttctttaccctttcctttctctgtaaatttttgtgaaaccatgagagttacttgcaaacatgatgattcttcaccccaaaatacttcagcatgtgcagtagtatctattactgcataacaagttaccccaaactttaatagataaaaaaacaagtatttattatatcatatctgtaggtcaggaatctgggagcagctgagctggtcctccactcagggtctctcatgaggctataatcaaagtgtgagctggggctgccttcacatcaggcatggtggagctcatgcatgtagctgttgattggaggcctcagttcctccccacataggcctcttcatggggctggggctgctcatgacacattggctgacttccctgaaagcaagtggagagagagagaggaagagaggaagagagggagcaagaagcctggatggatgccacagtgttttatgtcagtgtttatgtcagagtgacataccatcacttctgccatattctattggtcacacagaccaacccaggtactgtgtgggaggggactacacgggggtgtgaagaccagggaggcagagaccactggagtatcttggatgctggtgaccacagtgtgtttctctgaatgatgaggacattctcctacaaaacaaccgtactatgaccacacattaatactgtactactacctaacattcactctgtattcaaattctcccagatgtctcaataatgtcttttttaatcagtctagatccattccactttcttgacataagaacaggttgattgcccttttgggaaacactccttccccactctcagtccacctagttcaggaggggccaattctgatgccccagccatgggtaggcttatggctcagatccagctagtgaacactcagcattgccctggtgacagcgattggttcagggatcagcatgtgaccgaagctgggccaatcagaataattcctgaattttagctgggactgttaaggaaaaggcaccatctcaccactagggttgcagagctggtagggtcagattaaagacactgggagccatcttttctagcagcttgcaggagaggcttcctgagaatgaactcaaggtggtagaaagcaaacctgagtgatagagatggggggaggggagacaaagagagataatgactttatttttatttttttattttttttcaaaaatcccttgatcaagctatgtctgaagctaactacccctaggggttccagttatgtgagtcaataagttcccctttttatttaagccaatttgagctaaagttcttgttatttgcaacagaaagggtcctgactaatacatgcatcttccagggaaagaaaatgacttactgtaaatccttaacacagaaactaatttgcagtagaagtgtgctatgaggaagcaggactgatattcttagaaattagagttgttttgtctcctctatttgtaagagtctaacagatgacacagcaaaatctccagccctcctaccttccataacgggtttgctcatccatggaagttcatgaagttccagttatgccacttattactgctgtgaccttggctaagtcatttaacctctctaagcctcagtttactcatctatgaaacagatatattattaagacataaaataaggggagagtaaaataagatagggcatgttaagcatagggacagtactgagcatatagtaagtgctcaataaaatgtagccattcatagcagttctaagatgaaaaacctactacgtgcgaggatcttgcaaagatacacaagaaatataataggcctacctgaggatgtcagaaatcttcatggaggaagaaaggctcaatctggcccttccaggattcactcaaatttaaaaacataagcagatgaatagaggtgggcttcctacaaagaatgtgcaggaacacaagtcaataataagaacagctgagatgtattgagcacttactgtgtgccaggcatagctgtaagtgcttttcacacatcaactcacataatagttgaggtcctcccagcccttgaggtggggattgtgatggacagttttgcagacaaggacacagaagcccagagaggtcaaatcatttgctcaaggtaactctggtcctgtgtggagagccaggattcagaccccaggtgcctgaattcagagcccgcatccttaactgctctgccaacgctactgttgcttataaaacgtaagtgataacaacgacggcagttacagaggccacatatctatgccacagatacaaaacccaaatgatatggatatcaaagaaaaggcacaaaggccacccatgcagccaggaccaaggcccaggtctgtgggcctcttgtccctgaggggttaaatgttctgttctgtgagagtggccaggaccaagcacagcgctccgggagggaaggtgacaggccagctcagggcggtggccaaagctccaggcagctggtggcatcgggggctatggccagctgtctcctgctgaccaggcctgagcacccccaggcctctcaccagcaagacctccacagctgtcagaggggaacagtgcttgccatccacgggcaacccgcagaacggggccagtgaccccggggtgaaaggtttgcctgccgggcccctagcctcctgactccatctgtctcgccacctgcaagcaccatttctgactttttcctttggtataaatggggaggcaactatgaaatcaacagtgggaaaggtgcaagaggccccatcttcccagagcccgagcctgctggctgttgagacgtataggctgagaaggctggacaggggacgctgactaggggacccccgtgctggatggtgccatgggtagggctgtcttggaatcccacagacccacattcaaatcctggctttgcccctaagagctgcctgagctcaggtgagccatgcaccctatcacatctctcctctgtaaaatgggcacagcccacctcacagaggagctggaaggatgtaatgaggtgccttcagtttccctcaaggtctaggagggtgttaagtccaccggaagtagaacgaaactcctaagtcgattcccggctcttctgctcctcagctgtgtggcctttcatagcctccttcatctttctggggctcagtttcaaaatccgcaaactaaggggcatgatatccatctgacagggttactgtgagaaattcaatgcatttctatgtgtaaagtgcctggacttcagtaaacactattaaaagaagcagtaacagagtggttaaaggctctgacatttacctgctgtgtgatgttgagcaagttaccttccctctctgtgcctcagtttcctcacatgtatcatggagatactcatgcccttatcttaaaggcttgtcctgagggttagatgagacattataaaggcctttggagcttagcaggtggcgggtacatgatagacatgggttcttttttcttttttttttcttgagacaaagtctcactctgtgatccaggctggagtgcagtggtgccattatagctcactgtagcctcaaactcctgggctcaaggaactctccaacctcagcctcctgagcagctgagactacaggcacatgccaccacctagctaatttttaaatttttttgcagagatgggatctcactatgtcgcccagctggtctcaaactcctgggttcaagtgatccttttgcctcagcctcccaaagtgttgaggtcacacacgtgagcccctgtgcctggcctagacgtgggttctgaattttacaaaagtgcttggcaacgaatgttactgagttcttattagtaacatgttttctgttactagccctcctcaccaaggagtgggtggtggacaacctaaggaaagatacctttttattttattttattttattttttactttttttctttagacaaagtctcactctgtcacccaggctggagtgcagttgtacaattacagctcactgcagccttgacctcctgggcttaagtgatcttcccacctcagcctcctgagtagttgggactacaagtgtgcaccaccacccctagctaatttttgtattttttgtaaagacagggtattgctgtgttgtaccatttttagggggggaaaactctcttagagaaaagatggggaatggggcaagaggtctcctcacatttagagacatttttgtgtagttgtgtagtgtgggtgccatcctaaaagggaacacctcaaaagcctccaaagagagttatgcagatgtgacttacccacatggcccagctttcgagggatcacacagctgggctctggagtggatctgtgtcccttctctgactctcctgtgtgacttgggcaaggccagccacttaacctcaccaagccaggtcccatcatctatgaaatgaggacactgacagacctgcctcattgggagggttctctgttttgttttttgtttgtttatttgtttgttttgacagggagtcttgctgtcgcctaggctggagtgcaatggcacgatctcggctcactacaacctcctcctccccggttcaagcgattctcctgtctcagcctcctgagttgctaggattacagacacgtgctaccacgtctggctaatttttgtatttttagtagagacggagtttcaccatgttggccaggctgctctcaaactcctgacctcaagtgatctgcccgcctcggcctcccaaagtgctgggattatgggcgtgagcctgcgctcccggctggttctctgaattaatcggtgcagagcagtgattcccaaccaggagtgactctgcccccgaggggacatttgacagcatctgtagacatttggctgtcacatctagaggggaggcgtgctgcgggcgcctagtgggtagaggtcagggttgctgccaaacatcctacgatgcacaggacatcccccaccccgcccccagcactcaccaacaacaaaggaccatccactctgaatgtcagtaatgtcgatagacatcctcacgtagagtattggcttcagcatagtgccagtaaaaggaagtgcttgtgtttgttgaatgactaaatgaacttgctcactgcaagtctcagcttctcctggcatggagaaaatgtatctctctcccagagttgttgtgagatcaatgagaaatacgccagcctgagggcctctctggggccctgggaactgctgttggatgttgaatgaatatcatagcaagggaacattcggagtctcagatctgggatttgggcaggagggttcacccaggaggccagcttgcctgtgtgtagcatgtagttcttccagctgaaactgtttctccctgaaggatttcaagcacgacatatacccaaactaaagaggatggcagcaaaacgtgcagaaggaagctaggttggattcagcctccgtgctcccgccttgctcatctccaaagctgtaagaatttaagggaaacttaccccatgttttgttgcctcatttgtgcataattcatcaaaatgctgttctgtaaaagaacttctctgtggcttgaaaccctttgcacacttgtatcttttcctgcgctctctttttcttttatatctctccctctctctccccctttctttctcattaaaaagatgccttttctctcaagtgcaagaagctgacttgtgccaaaaacaagcagggtggatgctgaaagttcccagggttagcctggagcctcccaaccctagaccttgagcaacctcccagcttaagtaaaatcctcctccctgctctgctccccctggatggctctggggagtcccaggaatggccaggacagagggagccaggtgagggcctggctgctcccaggaaagagaggatgtcatggtcctgttttggccaagcaggtcctgttttggccaaccagtgctcccgtgcgcagatccctgtggtgatgggagacaattgcaagggtcagggttcgagacaagatactcaaaagtcccttccagtggtgggcacctgactccagggcgggttcgtaagggctgcggtagcttcggggcaggtgcagcctcggtctcctcacctgggcagtgggaataaaggggtctattcagattgttcggatgagcagtcagtgaggaggaggatgtgaggtgtgtgggtgctgggcactacaccaagcactcagggcatgcaagccaccagtgtccctgcatcttcagggcactttctgaacctcagcaccttcctctccaaaatgagaaaaacagcacccgctccatagtgttgttgagaggattcaacaagctccttgctacaaagcccccagtaggacctggcatataattcctgttttgaaaatgtttgtgtatgtctcacatcttacctaattcatgcccctgcctgctcataccaagaacaggtatccagtaaaaagggagaagagtgtaaaaggtgaagatgctacatttattttttcctggcaattcatttgattttttaaaaagaggccacatgttggtggctcattcctacaatcccagcactttgtgaggccgaggcgggcggatctcttgagcccagtagtttgagaccagcctgggcaacatggcaaaaccccgtctctacaaaaaatacaaaaattagccaggcgcggtggtgcctgcgtgtagtcctagctactcaggaggctggagcaggaggatcacgtgagcctgggaggtagaggttgcagtgagcctagatcaagccactccactccagcctgagtgacagtctgggtgacagagtgagaccttgtctggaaaaaaaaaaaaggttgcagttcgcaataggaaggtcctttctttatttgggtagccttagcctcgctggacctcagtttcctcatctgtaaaatggggataattataatacctgcatagcagaggtattgtggattaaatgagagcttttgtataaagtacttaggacagtgcctggcagttcgtaagtgctgttttaagagttcgccacattcagccagagtggacagtagactgaccgatttttagaaagcccaaattccctgtgtttaaccagctctaaaacatctcaggaacctaagcagcctctcttgtacctcaggtgtttctgtcctgtgaaaaaggaatgaatttgctggccgcctatggagttcccacagttgcgctgcttagtgtttgctaagccctcagagccctgcggaaatgcaggctgctacaaatgctattaccagaatccacattccccagagctctttggagatttgggaagcttgggtttgtttggacttttcatgactcgactctggtcatcgttagggcgtttgatgatcttagacggaatctgcctttcacctctgtggcctgctgggcccttctgggcgtgttacaggaagggaatgcatcattgctcctatctgcctagtcagcttttgtaacaagctcttgatatgatgattttgtgcttgggtaagcttttcagaccttctgcggctctttgctgcagaaggtggaggtactgggacaatcaaatcaagccatcagctgttgacagtgggcctggcaaggtctcacggtgcagaagacactgagctgtctcacgctggcttgcagtttggtatgtgggatccggtgtgcctgggatgagagcacactcgcaacccaagagggtctgaaaccctaagcactcttcgagggtcttgagaataagtactgacctcaggatctgggtccctttcccagtgggggttagagtctcagtggccttggttgtcctcctccagtgcctgtttatatttgaacttcttcctcctctggacctcacccattggatccctgcaggattgctggaccctctgccaagactggccatcagcgggagggctgcttccctccctacttctaagctcaaagccctaggaggtcttgcccgtggagacgaggtacatggctttgtgttttattgccatttattgttcttgttattttaacatttatggagcacgttttagctgtgaactcatttcttgagcatcactgcggtcaaaatctccccagggtgcagggccaagggttactttgattctttttttggctgttgccctatttactttattaaaaatatcattgtgcgaggggctccctttgttctaagaacttttctggacatgaccctgggtccaccctaagcccctgattaccatcatttgaacatgagcctgggtatgagtaaggccatataggccagcggtcagcaaacattttctgtaaaggaccatgtcataaatatttttggctttgggggcctctgctgtaactactcaactctgctcttatcacataaaagccgccatagacagtatataactgaataaaactttatatacaaaaccagacagcagccagaatttggcccatgggccatagtttactgactgccccctccccacccacccaacgtagatgatggggctttgttctacgaactcccttttagttcttccatagatctaaagagtcagttcttcttactgcagttttggcctgtttctacttctttgtttgatcccctagagcgtgagttggcaaactgaggccaacagctcaaacctggccagttgcctgttttgtaaataaagttttattggaaagcagccacacccattcattctgtgttatctatggctgctttcccactacaacagcagagctgagaagtggcgtcagagacctcttggcccccaaagcctaaaatatttcccatctagctcttcacagaaaagcttgctgacctctactctaaagagttgaggaatggctggctgagaagcagacttttttttgcatgtacatgaagagcattactaaccctcccaaactcatcttagaacttttctcccaggttctcttgtctagtctttcaaatattttagatgttattctctggaatctaagtttttttttttttccaaagttccagaccactgtttttaaacaactttggactgtgatcctcataaaggacatattttatatgtcacccctgtaatgacatacaataaactgcatacacacagatgtccccaccacacacacaaaccacacaaaacacatacagaaatgaaagttttaagaaacaatgcttgccttactatatgtgataagctctcgtattttctatgaacaccagtcaggatcagcttgatgatgctgtggtaacaagtaaccccaaatctgagtgccttaaatcaacagacatttatttattgctcctgctccacgtttgccctggatcactggggatcctgaaggagcagaacatcacacactgatctccaagtgtctgacaagagtggtactcaccatttctttgaatatttctttggtcaaagcagctcacatgaccataactttcaatagagtgaagaagtgcagccctactgtggacccagaaggtgaatctgagatatttggtcaacagcattaagataactaccatatggctgggcatggtgtctcctgcctataatcccagcacttttagaggccaaggtgggaggatctcttaaagctaggagttccagaccagcttaggcaacatagtgagacctcatgtctacaaaaagttttaaaactagccttgcatggtggtgcatgcctgtagtcccagccactcaggaggctgatgtgggaggatcgcttgagcccaggaggtcaaggccatggtgagctatgatctgcactccagcctgggcagcagagtgagaccttgtctcaaaaaaaaaaaaaagaaaaagaaaaaagaaaacaaaagaaaaaaattactaccatattagtctatcccaggagttggcaaactttttctggaaagggccaaatgctaactatttttggctttgcgggccataccatctctgtcacaactattcagtgcagcagttgtcacgtaaaaacagtcagagacaacatgtaaacaaatgggcttatctgtgttccagtaaaacattatttataaaagcaggcggtgggctgggtttggctcataggctgtgggttgccaaccctggtctactctatttcttttttgaaaaacactggtcacagctcactaaactgattttattaacccatctatgggtgagactctatagtttgaaaaccccaagtgacgataagctgcataagatgagggactaatatttcttatcagctgtatcctcggtgcccagtacagggttagtgctgagtaaacattgttgaaagaagccactgaaaatcctctccaactgtttttctggtgataaatactctgttcaagatgcatacgttattgtgtttctctcgtaaggttgcctggaaaaaaacaaaataaaataaagctgcacacattattgtttaattcgtaaaaggttgaccctactttcaaggtaactgtcagttccaaacttagagacacaagtattatgttcacttctctaagagcactgttcttcattcaagcttgagatgatcgctccataaatgtagtgttgaaatctatacttgtggaaacccaggtcattgtatatctgttttcttcatatatatttattatttattgtgtcagggaaaatacatgcactatctcatttaattttctcaaaaattgcaggaggtgggtgctaatgttactcgcattgtacagatgaggaaactgcagctcagaggaatatgcccagtgtcttggagctcaagactggtagagatgggattggagcagagtctctgactccagaatatggggtgtttgatcatttggctatggtgtctctgggacatgccaccacataccaagacctactcaagtgcaaggtctttaaatgctattggcagttgaggccatgttttaagtcctcttagaaagacactatattgtgcttcataagatgatacaaaacatacatgagccggttccttttatgggaaaatctgaagttaacagtgagattggggagtggggagggtttaacactttaacagctgtcctgctaagtgtgagagtaagtcaggccaaacctagtctcacagtcaagactttcaggtaaaagtaatagagaactcaagtcaaactggttcagcaagtaaagagaatttaggggatcaaggaactgagagtccagggtcagagctcagttcaggtatagctggatcagggttgctgatgcagtcaggatttcagttgttttctgactcttgacttgttttgttcttctccacgttttgggtttaacctcagcctgcacatggagctagatggtggggtaactgagccacaccctctaaggcacatagtaggtgctcaccaaatatttattgaatggatggactgctcaagattggcttaaaagcttgatacttttatgtagctgttaggttggtatgcattttaagatttgtgtgtatctgtctgtgtgtagcccagaggttaagagtggaagcacattgctttggttgcaacccttggctgtgccacttacccactgtgtgacttttggcaagggtcccaaccccagttctgcacctgcaactgccctatgaagtaggtagtatcattttgcatctatgatgcacaaggatagcatgacacaaagaggctgaggtgcttgcacaaggtgatttatggagctgggtgtgcaccttggcattctggttccatagcctgtgtttttctccactgtgcatgcaaagtgctcaacacagtgcctggcacagagtaagctcccagtaatcaaaagagccatcaatccaggctcgtttaaaggtggtggtggacagggcaagggtttctcccaggataacatgtagtgaagcatggagttgagtgatataaaaaataatcactttcctagagtctgggagaactgaattattatttcccagctgccactaatctgcagggggaccttgcagcgatgttcccctctcagacagagactcaattttcacaaccataaaataatctaaggagtctcaagtacccttctagccctgatattctaagagtctgtgacttgatgatgcctgtgagtttggaggtctcatggctgggcactgagtttccaagattgcacatggtttggggtgctggagctgtggggaaatcatgaggagtcactctgcagcatctgttccctgctcctccttctgggtgctcctccaccaaggggcaggaaagcccaaactcccttgcagctaggtttctaggagtaatggaacattaagcaggcacatgcgcttccttgaaattcagaaggcggaggtcgtactcaaattgcctctgccgtgttggttgtttctgtcactgtgcagagtctggagtagtttggcttgctgcacagctttagcagaggccccagcgagcaggcactagctttatgtgtgttgagaggcatggtgtctttgtgtgggttcccaagaagctgacctcaagatcagggctccagtgccaatagttcatttaagaggtgactccaagaaacaccagaatgggaataaagaaggaaggcatgaagcgaaggaaagtaacagagggtgtgtgatccagcaggttactccctgagcatctaaggctacaccctgatgggaaagggcttataacacgtgccgctgagtaatccctccttaggggtgagggagctggggtctttataccccacatatgccagaaagagccttcaggtaaaacattgcacttgctgccgtttggaagttggatggttttcatggaaatggtatttgccgaagggatttaggcaaggtagtgacagcatcagccacgcagggcacagggcatccttgttgcttgtaaggattctggcaagtgtgataaggtcatgaggctggcacattagtggaatggtttcctgatagagatatccacaaggtgcctatcatggagggattttttctgtaaccagcagctttctggtcacagcacatgtagcagtaaccagttgtctggtgtcgctttggcattccctaaagcttatcctagcgtctgtgcccccaacctccccagaaattctctaagtcgtttgctagcctgaattaaccccttcctgcttaagctagctgtagtgggttctaccctctgcaactaaactctggttgataccagttataacctacatcctgggtctgctggacaagcagaagagtgccagtcactgaggattagaacaaagttcccacaacagccctgaagggcaaccgggctatgcacttctacatcatgggccaccagggagctgagtaataaaaccactctcaggcgtcagaggactcagattcttgtcccagctcccccactaacctgctgtgggaccttatacaggtaattttcgtcatctgaacttcaagtgactaatctgtggcccaggcaggagaggatgggggcgagagtgtggatttcaggatcagatgggccaagttcaacctctcagagcctaagttccttcatttgtgaaacagggataacagggttcccagagaaatattcagaagcatcagagcctctctgaagaattctgccacctcctgacattgtcagtttccctctctccctcttccttcctctctcttaacaaatatttattatgctcctacttataccaggcatgactattggtgttgaaagcccacaagtctctctttctgtgaatcatagtttctggagggtagagacagacaagaaacagacaaaggcacgtgtgtaatgaatgtgtccgggggtgagaaatgcaatggagaagaactccgccgagcaatggggcaggagtagtgagggaccctccttaaggtagggtggtcagggaggtctctctggcagaggcctgagaggggcagggagagccgtgggcatgtctgaaaggagagcatgcttggtgggggatggggcttgagggaccaccactaggaggccagtgtgagagatggagggtggcgggatctgagctccagaagtcaggggcgggatcagacagggcctcatgggttgcgcttggctctttagattttactctgagcaagccagaagctggcctcatttaacctccttttagaaatcggtgtgatgaatcaatagctttggccgtttgttcatcagtcattcattcattcaacaaggatttgttgagcacctcctttgtgcagctctgtgcttttctagttcctctgctgaacagtgaagggcagagcaagcacccaccggaataaggagggagttgggcattttgctagagctcctgtttggtccagaggccgcacacaatggaaaagtaaagcctggtcccctccgcaggccaccccgcacctggaggcatcacctggagctcttcctggcaggctgaggcctgcgagttcagccccactggcttccccggggcaggggttgcccacgcttgctgaaataagaacctcataccagatcagccccgcatcccaagcagggcaccctaaggatgcttttatgtaagaggttgcattcccaattatcttaagatgcaaagtgaaggtgttttgcccagggaaactctctatcaggagtcgttgcacatctaaacacatgaaaaatgagacttcctgaaacattcctatttcaccctgtgacagttttgcacagctcatagagttcaattttcaaatgtcatcccactctgagagacccaatatttgaagtcgtggaaatctatctttaaaaatacttttaacagcattattcctaatattaaaacttggaaaacacgaaagggagatacttgagttgtgatcatagcaaatgttcctataatatttagtgtgtgtcactgatgctttacatattctaattcgtttcatcttcatgactaccctctgaggcagatgtactgttaaccccactttacacatggggatgctggggtctgagggcttgagaactccgcgggttaacccaagagttatgggacctggttatggaacctcagtgctaaggaaagtgacaccatcataggtagtgttagaacaaaatcttggggaatggttatgttttcctgttcggtggaaaggaagcatcaacatagaagattaggtaggagctcatgtacactaaaaatgaaagtagattagaatgagccgggttggaagtgggagaaatgtccccaaacacaggtttagagttggccttgagaacatcagcggtatggacagatgtacggacactggggcctgataattcttccttatggcgctgtcctgtgccttgtaggatggttagcagtattcctggcctctccctccccagttcctctccctccccagttatgacaaccagaagtgtctctggacattgccaactgtccactgggaagtaaaatcactgccattcagaaccaccagcacagatgctaagatcatgggtggcatttttctttcctttttcttttctgtggtttccaactttccttgaataggcatagatcgcgtgaataagtaggagcaaaggagctctcgttgggatgaccatgccactctcctgttcagaaccttccagcaaattcccaatacacttagcttccccagggcctacaaggccctgtgtgagctggcccttggctacttcttggacatgttcttctctccctgtgaccctttctcatcatgttccaaccacacgattcttctttctgacattcagacacatccagctcatttccatcccagggcctttgcatgtgctgctctgtcctgttgctctttcctacctcctcttcacatcacttgctcatccacttcaggggtctgctcaaatatcacctcctccgagaggccttccctgatcaccctgtcatgaatatttaagcgcctcctgtttattgtaggtcacccctactagagcatcatctccagggggactgagacattgtttaatttgctgttccatgcctcactcctagaacaacgatcggcacatagtaaaagttcaataaatatttgtggaagaagggaaacagacagggaggaaggaaggggggcaaataagaaaaataaaatcggtaaatttaggagcttacagtaaagaagcaatgtctcaacccacacagctgtgtttctctctaaattccaactcattttgacttgtggtttgtggacaaaagatttgcgtagcacgcagtctcctggcagctcgctctctttgagggaacacactaatacagtttttatgccacctctctccacaaataccatgccgatgagtggccagtgtcaaaacagcagcaacaacataaacagatgctccttcctttcagccgagcaagtgaagaaaccctgtgcgtcattcctcaaacaccaggagatgccaccgatagccacctctcctcacagtttcgttctgctcgagactgtgagttcatgtcaaccctgagctgcgtccccagggaaataggttctgctaacagtcagttcttactacgaggcattctcagagccaaggggaagctgggttggtggtctgcagctgaaaatctttggcagaaaatttactcgaggtttttcatgtgtgtcatttgccttgattttgggagtagggaagaagcactatcagtatctttggccattcgtaaggtcaaaatggatgtcggcacgtcctgcaggccttttctcagcctgagttgatttcctggtgcttgatgggtgagcagaggaaggcaggttttcattctcttctctcttctttttcattcttttgctgcattattcatttccttccacactcgttcatgcagtcatttttttttttttttgagatggagtttcactcttgttgcccaggctggagtgcaatggcgcgatctcggctcaccgcagcctccgcctcctgggttcaagcaattcccctgcctcagcctgtagctgggattacaggcgtgagccaccaggcccaccgggcccagctgtcattatttatttaatgagcacctactgtgtgtcagccaggcctcacacctggcacttagagaatctgaataaatataaggaccacttttatactcaagaacaaaggccacctcaccagaaacctctacacactttggggttcaggtttcttgtgactttcttttccttttttggtttcatttttaattacaaaagtaattaacatgcttatcatagagcaataaaatgatgctgaagtatataaagtaaaaatagatcttttctgacataacccctgttaattgttgggtatatacccttgcagacatgttttaataaatataaaaatcatccacaaattcatagagttttctttttacaaaaagaggatcagattttacacaccacaatttgctagtctccactttcataatctcgacattttttcactgttagtacatctagatcttatctgctttgttactaatagtagttcatgttgcttatatgttacaatcttaatctttcctatgttgatcactgagtacaggcattggcaaactttttctgtaaagggccagatagtaaatatttatagctttgcaggccatgcaatctccatttcaactactcagttctgtcatcataacatgaaagcagccctagacaatatgtaagcaaagtgggtgtgtctgtgttccaataaaactttatttacaaaatcaggaagtgcaccagatttggccttcaggctataacttgccaacccctgacctttttgtcttccacatttttcttcatacttttgtgttcctaaacagatgtattcaggtttggtgtttagtttggtttaggttttttgtgggagcaggtggcaggaagaatcactgattgttttttaaaaataatacattacacctgcttagcatctgattttttgcccatcagtgatattcatggaattgcttccaaagcaatgggtataacccctacttattgtttttaacagctgcataaaattccatcgaatggatagaggatctgtattggttaaggtaatgtcagctgctgtaacaaataaaccctatattctcagggcttaacacagtcacaatggatctctcacctaaggaccagtaacagtgttcctggtagatgggtgtcctccatgtggtcaaccaagggcccaggtcctttccattgcataggtctttctccctatagtgtctcagaggcaagtccaatcagcaggtagatgagaaaagagagggaagggtctggtatccaaggtcttaatggccagccctacacattgcacacatctcttctgctcatggtccattagccggaactcagtcactggctggacctaactgcaaggagactgagaaatgcagcgtagatctgtgttcaggaggaagaatatctggatttggtgggcacataagcatccctgcctgtattagtctgttctcacgctgctaataaagacatgcctgagactggataacttataaagaaaaagaggtttagtggactcacaggcctcagaatcatgaaaggcaaaaggcatgtcttacatggcagcaggcaaaagagagcatgtgcagggaaactctgctttataaaaccatcagatcttgtgagacttattcactatcacaagaacagcatgggaaaaacccaaccctatgatttaattacctcccactgggtccctcccatgatatggggtgggagagatttgggtggggacacagagccaaaccatatcactttctctaaaattaaatgacttacttgaggtaaagcagttacaacagggcctggtatgtaggaagcactcaataaatgcacctctgctattgcaagcttgtattttttaagtattctatgatactgtcatgtccttgggacctctggtcagctctttacccctgcgggttactgtaccccttcctccttctttactgcttctaatagcctatcaatggcaagcctatcaattatacacacttgctaaaatttcactctaaaaactagtcaataccaggctgaataagatatcaggaagatgtcaggttcttatcactggaaactgtacatgtcaccttatgtggcaaaaatactttgcagatgggattcagttaaggatcttgagatgggggattatcttggattatccaggttggccccaaatgagatcacagttgttcttataggagagaggcagaaggagatttcacacacacacacacacacacacacacacacacacacacacacacacacgaagacaatgtgaagacaggacagagatttgaagatgttggccttgaagcttggagtgatgcagccacaaatcaaggtttgctggtggacaccagaggctgaaatggattctcacctggagcctctggatggaatatggccctgtagacacctggattgtggcccagcaatactgagtttggacttctgtccttcagaactgcaagaggataaatttctgttgtaagccaccaagtttgtgcttctttcttacagcagccacaagaaatgcatccactgagggttctagggctctcttgtgaataaaatgtataagcttctcaacttgcaatttgtcccaaactacattccctgctctccctaccaactgccttcccagtggtcatgagctctaccatccactcagagttcactctgaaagcctggaagacttgctggcctcttcccaatccctcccctgctgtatcaaagttgatcgctaagacttatcaccatggctccgaaatagctcttgatccactggaacactttattctcaccatcacaccctcgcttgcagtgatggcattttttgcttaagctagaactcgagtctggtaaatgggttcagctgcgcctgtgtctccctctctgcctcctgccacgctgctgcctggggacagttttccaaagttgttcctgtgcccagcattccccacaggctctcctgctcctttgagagagaatctaaactttaaccaaaccttgaaaatgccctcatttctcgccaactgagccatgatggggatgacttaggcagggagacaaaatgagcctggttgcaataaagtttggtgattttttaaatgaatctgagctcacgtgtaattatgaaaaaaaaacatgaacatgttatatagtttttcactgatggctggtatgaagatagtagcattatggaaatgagagacaacttgtccatgaggaaccctcatttttttaaactgttaagttcaggggtacgtgtgcaggttcgttctataggcaaacttgcgtcatggaggtttgtagtacagattatttcgttacccataaagtacccgttagttatttttcctgagcctctcccacctcccaccaccaccctccaataggctccagtgtctgctgtccccctctgtgtgtccatgtattctcatcacttagctcgcacctattaagtgagaacatgcagtacttggttttctgttcccgtgatagtttgctaagggtaatggcctcaagctccatccatgtccctgcaaaggacgtgatctcgttctttattatggttgcatagtattccatggtggatacgtaccacattttctttatccagtatatcattgatgggcatttaggttgattctgtgtctttgctatggtgaatagtgttgcagtgaacatacacgtgtatgtgcctttataataggatgatttccattcctttgggtatatacccagtaatgggattgtgagtcaaatgttatttctgtctttaggactttgaggaatcgccacactgtctgaggaaccttcatttgttggaaaccacccaacacagagtagatgctcaggaaataaatatgcagtggatgagtaatatgtgcagaatgacctgactgagtcacaaagacctttctggttgcatttgcatctgtcattgtgtacatagagcccttccccttagttcagagtctctccccttggcactgtggagatttgggactggaccattcctttgttgggggtgggggctgatgctgtgcattgtagcattagtttagcagtatccctggcctctaccctctggaattgtgacaatcaaaaaggtttccagacattgccaagtgttctctgtggcaggggtgtggagtgaagggcagaatctcctctgttactgctttagctgatcgcagtgaggccctgtccctttgcagaactttattccattcccgcctcccacggcatcctcctcagcttcctcctgcatcactctgccgttggcatccccccaacacatacgcacacaaacgtgcacacatgcacgcacacgcacgcacacgcacgcacgtactttccttcaattgctccccatctggcttatgaaactgacagagaataaagcttctctcttaccctctcccaacccccacgtcgttgtcctgcacctggctggccatccagggctcatctcttttctctgaaattctccaagcatccctgtcattgtcctgcacctggccggccagccagggctcatcttttctctctgaaactctccaagtagccactgaagtcagcaggaactcccaaagcagagacatgccgtggggggaatatgggaatctgtcgcctgatttttcatggccttctgaaatcacgagaaggggttgcatggaaacggttgaaagaaaatgattttttaagtgcccctctggccacactggccagattcaggctaggtctggcagccagagctcagggcaccacgtcatgcctgaattttgttttatttttctatccattattcgaaggaatcatgctgactttggctattaagtgagcacttactatgcaccaacaaagcactcggcatgtattcactcatttcacgccactgcaacctaggagatggacacggacactattattatccccattttacagtggaggaaatgaaggcttagagagacactttacccacgggacacatctagtaggaggagcagccaggatttgatctcaggactgtctgatgccagatagtaataataaaaacagctaagtttactgatgtatttactgagtgccgggtgctgcctggggggctttacatgaattgatttacttaatcatcccagcagcgctatggactagaaacctttgtgattcccattggtggatgaggaaaccgaggcacagcaaggttctatgacttgcccaaggtcgtgtggctgggctcccgtcgtccagctcttaaaccctctgctctagtgcaggggaggaggcaaaccatgtctcataggccaaatccaatccactgcctatttttgtaaataaagtcttattagaacacagtcatcccattcatttatatgcagctgctttcacagttcaatcgcaaagttcggtagttcagcagagacagcgtgacccacaaagcctgaaatcttcaccgtctggccgtttacagtaaatcttttcaacccctgccctaggaccttccctaactaccatcctgccatccaagctgtggggccccttccctgctggagcagcagcacatcaaagaacgtaaacgagtgggcatttctgcagcccccagaaagcaagccggcatcccaggaggtgcctgggaggctctctgagaaggctgactccccacctccaccatgtttcctggaggtttggctgataattaggccagtcctattatcaaaaagaccaaaataaggccgagcacagtggctcatgcctgtaatcccagcactctgggaggccgaggcaggcgggtcacctgaagttaggaattcgagaccagcctgcccaacacagtgaaaccccgtctctactaaaaatacaaaaattagccgggcgtggtggtgcgtgccagctatttgggagactgaggtaggagaatcacttaaacccaggagacggaggttacagtgagccaagatcatgccactgcactccagcctgggcaacagagcgagactctgtctcaaataaataaataaataaatttattttaaaaaatagaaataaaataacaaatgctggcaaggatgctgagaaaggggaactcttacaccctgttggtgggaatgtaaattagcactattgtggaaaacaatgtggaggtttctcaagaaaactaaaaatatagctaccatatgatccagcgatcccactactgggtattatccaaaggaaaggaaatcaatgttgaggacatatctgcactctcatgttcattgcaacgctattcacaatagcccagatatggaatcaacctaagtgtccatcagcaatgaatggaaaaagaaaatgtggtaggtacatatacacaatggagtactattcagccataaaaaggaacaaatcctgccattctcagcaacatgaatgagcttgagggacattgtgttaagtaaaataagcgaggagcagaaagataaataccacatgttctcactcatagttggaagctaaaaaagttaatctcatggaagcagaaagcagactggtggttactagaggctgagaatggtgcaggggtgaaccagaggctgcttaacagatatgaaattacagcaagagaggaggaataagttccagtgatctataccataataggatgactacaactaacaacaattgactatgtattttcaaatagctagaaaagcagattttctttctttctttcttttctttttctttttaagacaggatctcactgtttgtccagtctggagtgcagtagcacgatcaaggctcaccacagcctcaacctcctgggcttaagtgatcctcccacctcagcctcctgagtagctgggactataggcacatgccaccacacctggctaattttttatttttgtagagatggggtcttgctatgttgcccaggctggtcttgaactcttggtctcaagcgatcctcctttctctgcctcccaaagttttggaattacaggcatgagcgaccgtgcccagtcagagcagattttgaatgtccccaacataaagaaatgataaatgtttgaggtgataggtatgctaattaccccaatacattgtatacctgtatcaaaatatcacactgtaccctataaatatatacaattattatgtgtcaattaaaagttttttttttaaagattgggccattccacataggcccaggtgcctgcctcagccctggagaaagagaggggcataaagaaatctaagttgctttctcctcagtctacttaatccctgacaaaacctggtacatcttccacagtgagatcatatgtcgcctcttccatgaagccttccctgattccttcaggcagagtgggtgaggatttcctctgggctcctcattgccttgactaccttgtcgcatcctaccacgtaacagcaaagtctgattttccctttacatgcctgaagcagacactctcagggccttgcccacatccccactcttactgcttcagtgcacagctggactgtgggtttctagctgccaacacctgtgtacctttacccatgggccttctctcaccaccagagagcctgctttgcctgcctgcgtggcaagtccaaagcaccagagtgaatgcctctgttccctggcaccagccttcagccagtgcctcacaggagtgggtgtataaataccactgctccctcgctctacccctccaccccgtgggatgacggcaagtggcgttttctacactgactcgcacagtgcctcagcaggactaagccccagttgcccatggtggtaacttgcttgatgacacaccctgtatcggctccttctgtttctcttatcgcatccccagtcccctactggtgtttctcaggatcatctcccaaataaactgcttgccctggaatccttgtctcagtgtctgctcctagggagccctcatcaagtcagcatcctctcttatccctcctgcaggcaaaagctgggtctgtctctgaacccaccacagggcctgctgtagagcagatgctcacatcagtcagtcgtcaaaaaagaaatgtactgagtagctgctgtgtgccaggcaccgtgccaagccctggggacacagcagcagacagaaccgacaaggtccctgccctggtgagctgagattctaggacaatcaaacacaaataaatacatgagctaactttagatggtctcagtgctctggaggaaataaaacagggtcatgtgcaagacctaggggtcttccatactcactggggattgtttttaatgacaatgtccaggccttatccccagaaatgtctgattcatttggtctgaagtggagcctgagcattgatatttaacaaaaaaaacacctcccaaggtggttctgatgtgcaaagaacacctgaaggtgggccgggggtggtggtgaggacaggcagctggcctccctgaggaggtagccttcggctaagccaggcgaacaagcaggaaaagtgctctaggcagaagcagctgcacatgcgaagtcccagtggcaagaggtactatggtgcaggatgttcagcatgatgggaacacgggctgccaggaggagacagagagagatgaggcccacaggcttcgggtccttggtcttagagctcttgagccattgtggctcagactgcagatcttaacacatcagcgggttatgaaatcaatttggtgagccacagccagcatcgcaggaagaaaagtaatagaatcgaaaataccagagtgtgttgcacatgaggtcagtgtggttttttgaaacttttatttgaagttttataaaggtgtacactgcactgcattgcaaaacaggtttcttactgtgagtcttggttgaagaattcgaaagccactgtttttagtccctgtgaaagtttggaatttagcccaaggggcagtggggagcaattaaagaggttttagtggggggcatgacaaggtcagatgtatgtttaaaaatctcactccaggagtgtggagaacagatttggaggaggtgggcagtggaggctgggaggcgtcttggcaggctgttggaggcagtcactggggtgtgacaaagagaaccaagtagcacctggcacacagaggtccgcaggtggctgttgaagggatgcacgtgtctgcaacatgggaggatcctgggaggttgaaaggcaacatttcaagctttgcctccaacccctccctgggatgaccacctacttgtcacctgtcctgtgacgcaggtatcccaggcatggcagataatagactctgattttaacacttcctgtttgccagacactctgctaaatgctttcaaaactcatgtaatgccctcagaacaaccccattggtaagtactgttaggattcccgtttcacagatgaggaaactgagaccaagaaaggatgttacttgcccaaggtcacagcgatcatcaagctgtgtagctggcactccagccgggcagtgcggctctagagtctgtgtgccccagcatctgctgcagtcatgtgggagccaagctgcttgggtttgaatttaggggataatacactgagtactctcgtgaggatttagtaagggacggtcagtgagtaatacattcagggcagtaagggcctggagcttaggacgtgctagataaatgagagtgagttgtgccactagacgcccaacttgtagagttggattcaaattcacgtaacttgtgaacagacggtggaactgccagggttcgaatccgcctctgacacttaactgcctgcatcgcaggagtgtggtaccagcgctggctcttgtaattaggtgctctatgtccagtacttagaactgagcccgaccttggtgaaccctaagcatgagccattgatcccactgctcaaggtcatacaggaatacaagggccaaggctggagttcaaacccacagccagcttgctactgagcaactacagcccagtgtaaaaagggctttaaacagtcaagttaggtttttctctggctcttcgaatccttaatcccttctctccatgtctgcccaccagcagtgttcccaagttagagcttccagcccaggcaggccgccagagtcaccaggcaccccagggcacagagacccatccacagccttgggcaaaggtggggggttggagggaagcctctgagagagctggaaggtcccagccccgcagtggccaccaggtgccagggcctgggcctcacgcctcatagctcctgagtctgacctaagcgtgccttcttcccagcgtgcagaactgtttgcctgggcgtaggttggagacaggtgaccccacctggttggttcaggcccacgcttgttcagcctcctagacgctctgagtcttggcctcctgactcctctggggttggcgcagccttgcttgccttggctcccgtccgccgggctgttccctgcacgtacgagtggccctttagaatgtgtttgtctggtcaaggttgacaaacttcctgagcccacgtctgttgacttttgtgggaccttctggctacctggctgtcgcggatgcttcgctcaagccctgtcttctctcttggggtgtggagtcagctaagagggcagcagagctggctgtgttcacggaatccagtgtctggagagaaagctggtgcccatggcggctgggactggcaagtgaaaacttgaaattccatgaatgtagcacctggtgattctttggagaactttaaaatgcagcatgagtataaactgttcttaacaaccaggatatgaacgaggcaacctcttacagtctttttttctttttcttttttgggatgggatatccctctgttactcaggctggagtgcagtggtggcatcatagccttgagctcctgggttcacgtgatcctgccgcctccgcatcccaaagtgctgggattacagggatgagccactgtgcccagcataccgttcattcatttgttaattcagcaaaatactattcatcacatattctgtggcaggtgctgttctaagcacagggatagagcaggaacaatctagctacagcctctgttctcatggagcatgttaaggtctccagcaacactgtccgagaaaaatataacatgctttaccagtgtgagccacatatgtaactgcaaattttctagtagccttgttaaaaaaaatatgtaaaacagcaggcctggcgcggtggctcacacctgtaatcccagtactttgggaggccgaggtgggcggatcacgaggtcaggacatcgagaccgtcctggctaacacggtgaaaccctgtctctactcaaaatacaaaaaaaattagccgggcatggtggtgggtgcctgtagtcccagctacttaggaggctgaggcaggagaatggtgtcaacctgggaggcggaccttgcagtgagtcggtatcatattgtgccactgcactccagcctgggcgacagagcgagactccatctcaaaaaaaaaaactgtgaaacagtacattttatttaactcaagatgtcaaaaaatattatcatttcaatacatcatccatacttttaagattactaatgcattattttactttttttgtatcaagtctttgagatctggtgtgtgtttggacacatctcaatttgttttttgtttgtttgtgtttgtttttgttttggggacagagtcttactctgtcacccatgctggagtgcagtgacgaaatctcagctcactgcaacgtccacctcccaaggttcaagtgattctcgtgcctcagacacccaagtagctgggactacaggcacacaccaccacatccagctaatttttgttttgttttgtttttagttgagatggggtttcaccatgttggtcaggctggtctcgaactgctgacctcaagtgatccgcccacctcggcctcccgaagtgttgggattacaagctggagccactgcacctggcccacatctcaatttaaactagccacatttcaagtcacctgtggctcatggctactgattagagtctaaagagagagataagcattatacaattaaatactcagctgttaattccaatggtagtaaatgtcatgattgacaagttcagagtgcagtggaaattaatccagtcagggaggatggtgatagcagtaatggtatcagggaaggcttcctggaagcagtgactttgtgatttttatgcagaaacctaaagtggggtgaaggggaaggatgagcattcaggacagagggaacagctgtgagcagaccccaaggtgccaaggagcttgctgcttttaagggataccaggtaaaatgctggtatcaccagagagttgagtaggaagggatgcaacaggagaggttagcaggagccaggccatgtgaagcagctcacatggctcctggtgcacagcagtgctgcactcacaatgacaattggcacttggagagacagctgctgcttgcagttacatcacagatcgggatgattggcttgaccttgtgtattggaggcctccaggacaacccctggtggtggcatagacagcagccatcatccctccttgcaggccaacagaagctcgatcttatctggctgaccatgggctctgcccaaggagatgaagggtggttagaccaagccccttgtgattggtctggatgagatatgggggatggctgctggaggatgctgatggagatattcctctgagataaaatgaaggcgccacatgaatggagcctcttttcccactttcttccttcctgcttagagtagggccatgtccagttgtgtttcttagaaatgtggcttctgatgtcctgtgaccctagggggaggacaagagacaggcgaaggtgcccatctagggccctgatcttgttaacccacctgaaccgccatcaccagacatcttagcaattgtgatcattcatatctgcaccttttactgtaacatgcattgtgtgggatgaacccaagaatggcaaacatttacctggcacttactgtgctccaggtgttcctcaaagccctttgtctcacgtcatcctcacagcaactctctgaggttggcgcctttcttatccccattgtacagatgagcagggactcacgcccaagggttgcggctgtatcttttaaccgtcaccctatactgccccctccgtgtttaaacatgttggtttggaaagctcattcccctccccttcaccaccccccagaacatcattcctctaaaacaggtttctcatgctcagcacttttgacattttgggttggatgattgttgtggagctgtcctgtgtgttacgggattttagtagcattcctgacttctacccaccggatgccaatagcaccctccccattggtgataaccaaaaatatatccagacattgccaggtgtcctctgggcagcaaaatcccaccccgccgcgccccccaccgaccccactaagaacctctacgctaaaagatgttttcctgccagtcacctgggtcgctctgtgtccttgttcaggttaacgtttctgaacctctctttcctcttctgtaaaatgaggggacagtattacgtatctcatgggttattttaaggattaaatcaaccagtgtatggaaagcagctaacagtgctgagtgcataatgagcacttgctcggtgtgatgatttgacctacacggctctttcttgtctgttttcagctaacaggaactgctagctgggattttttttaccagcaaaagagaattccttgatccaaggtgaaatctaccagggtgttagctctgggagtcagaggctccatctgtcttcctccgctactggattgccaggaatttttttttgttttttgtgttttgtttttggttttttttttgtttgtttgtttttttgacacttagtcacccagactggagtgcagtgatgcaatcttggctcactgcaacctccgcctcctgggctcaagccatcctcctgcctcagcctcccaaagtgctgggattacaggcatgagccaccgtgcccggccgattgccaggaattaaatcagtgctggcacatagtaggttctctgtagtatttgttgactgaataagtgacttaaatccctttgattagctatataacttttttatagatttctcttgtttctttcattcttccctgccttcctctgtctttgtttctcctcttttgtttttgtttgtttacttatgtgtcttgttgttgttgttttttatttgtttttactatggctttggtttcactacccaagaaatcccagacttcagcactggaagctaaagctgaactaagctaactcaggagcctcaaatctattttaggagttaattcccttggcttggttcagccccacaatgcactctttgggggttcatttaatttttcttagcaggttctggctggatgttaaacctgggcaagggaatgtgcttcaggctgttgagtttaggctttacttagaatctgaagtccctccaccatttgtgtacaaacatcattataatataatttactattaaatgtaagggggtgaaggggcatgcagaggtcacacatgttccctgaaacataatcctataattaaaagtgtgctagaccataaaacttacgatgttcccatctctaaggctacttttataaaatgcatctcatgttcttccgtcggatcttctgacctgaggcataatattaaaacatagatcaactcaaagggtctttgatttatatggtacatttgcagacaccgactgcagttcttggtgaagaatcagttctcagattgccatagttaagcgcgactgaagcgcggtgaaagtacttcctaaaatccagagcgaatgtgaattcatctttttctcaaatagccaccattttgaaaatttctctgtttccatttcactactgtcctctgctatagaaattagggttttctgcttgtttaagtgtatataaaaatagaggagaggttctcaaccagggttgatgttgaccccaggggacattttgcaatgtttggagacatttttagttgttacaactcggggagagggcagctactggtaactggtgaggacaggggccagagatgctgctaaacagcctgcaattccctgtacaacaaagaatcacccagcccaaaaacctcaatagtgccaaggctgagaatttctgagatagagagacgttcgtttcatcattgattaaaatagggtaaaaaaacccaaactgtgaataacctggatgtacattggtggggggatggttaaataataaactctgctacattatttcagtggaatactatgcagacattgaagaagaagcaggcggctccatgtgtactgatgtcgaaaactgtccaggatgtatttttaaatggaaataaaaacaaacacaacagagtttttgttaaaccattatgtttttggtgatattaaggaattttgtgccttaatgttaaggaatattgtggctatgttttcaaaaaaagggtctttttttagagagagacttacacggaaatattgacaaatgaaatgatattatggggtttgcttcaaaatactatgacgggggaaatagatggagtggaaatggggcaggactggccatgagtgctggggctgtgtgatgagtttaggaaagctcattagatgagtctgagtatttttgcagtgtttttgaaattctccataaagttgctacacacacacacacacacacacacacatgcacacacacgtaaatgcactgaagaagatctggtgggagataagagatggtgagtagatagaaaaatacagacagatgtagatttggctctgtgtaacaaagagcttaaataacagtggcataaataacctaggagtttatttctctctcatctaagagtctgagcagcagctctgctctgcaaagtcatcagcagcccagattcctttcaacttgtttcctcatccttaaggtgctgctcttttcctcattgtccaagatggcactccatcacatgacgttctatccaataggaatgggaaaaagaggaaggtccaccccattcctttaaggacctaacctacatgttacttgcatcacttttgattccaccctagtgactgcgcttagtcacatgaccacagcctaactgcaagggaacctgggaaatgtagtctttattctgggtagctgagtgccctgctaagaatcagttgtttgtagaagagagaagagaaagaatattggggatcacctaacaatctctaccacggtgtactcaaactgtgaatgataattagcacagatcagtgggactatggggaacttatcttttcacattatatgttgctctgactgttttaccattagcatgtgtattttctcttttgtaaagagaattaaatataaaaaatgttctgataagtggtgcatgcatgatccttgtatgtaacactgtgaggctgtagtgtcatttttcaatattcatttcgctggtactcattgcctgactgtttagtgctgattacaattactttattagatgctaaggacacaggagtgacaagacagacaaagcccccagcctctgacagtgaacagagaaatatgcagtatattttaagatagtgatcagaattaagaaggcaaataaaacacaatcatgggataggaagcagggggtgattagggggatgtaggaagagtttaacaatatgatcaagaaaggaatctctgaggaggtgacgtttgagaaaacaccacaggtggaagaggatttgttgcagaaggaacagcaagtgcaaaacctataaagtgggaaccaacacactaggtttaaataacagcaaaaaggataatgtccctgcaggagaagctataagaacagaacttccagaaggtgcgattagagggtgggaagggttttggattaagtgttatattaggtcatttgggtattaattactccaagtcattatgaccaaaaggtagttttcctaattatttgcaatcattttcaaaataattaggaaacatggaatgtggaaaaacactccattggcacagtgtcatgtggtgaaatgagatctgcaccttgttccggctctgcctgtcattagctgtgggacctgaggaaacttacttgatttcttggcctcccagtttcttcacttttaaggatggagaagagcacttactctgtatcctattctgctctcagaactacacaagtagtaagtcattttatccccacagcagccccaggaggtggggaccctttttatccccacctggcaagtgagaaagttgaagcagagaagtcaaggaagatcccacaccattagcaagtggcagagccaggatttgaactcaggcacctgggcacctgaggtagctgcttagtcaccactgtaccaggttcctgccggctctgcctacctcacagtctggttgggagtgtgcaatgaggaaagaattttgacagcaactttcaagaatgtcaatgctgaacaaatgtattaacattattggaatattctggaatatctctcttctttccaaataaatattttaaagtttctaaactcctaatgaaagaattgattcaggccacaaacattagtggatgaaaccatcagatcggaggttaatggggaactttataatggaggaagcaggtggtgctacctgaacacaagggccctcgtggtgtcactaggagggacacacctgggactcctgatgagatgcaatggtgagagcccagcacaaattccagagcattgctgccctcccccaaattactctgaacctaatcacatttcaagctaatttatgggaaatacaatgaaaagagaaatgcattaacaacaccgtgaacaggcagacagacaaatacagaacgtgagatattctacaacacaactaacctagtttctccaacacatcaagagtctgtataaaaaggagggggaggctattctagattaaataaatgtaggcgatacaataagcaaatctactgtgcagacttcgtttagattccgtatcttacaatccacccttacaaaggcatgttgagacaattggggaagattgaatgtggactgtgttcacgatgacacaaggagtgagtgtgaattttgttagatgtgataatagaaaatctccatagttttaaatgaggtgtggtggagagaagagacttcaagtttgaatttgttttaaacacttcagcaaagagaaaagtaaacaaaccaaaattctgagaagagacacatttggaaaaaccgtgaacattgttgagtctaagtaatgggtgcacagaagttcattccactattctgtctgcttttgtatatgttggaaatttttcattaaaaaaacttctagccccactatgaagccgtctgaccaaaagagaaggaggaaaaaaaaaaaaccctcatcgtatgaaattgcataaaattcagccaacctcaaaacaagaataaaaacatttttaaaaaaactcatgaatcgctgcatggctctttcaatttcggggtaatgatgtaattagaggagctcagtcattagaaaagattaattttaagacatctgctgctgtcagtggcagatggcagaagagtggaacattgaaagcacggggctctcaatccatctctgctacttaccgttgattttaggcaaatgtcttcaatttctgtcctcactttccttatcagtaaaatgggattaaagttctataggggctattgggaagattaaggggactcaaatatgaaaggcacttaaaacaatgtctggctcatagacagtgcttagtctacgtgaactactattattttcactttcatggtggtcagagcttcatgggggcacaaataatttggaccaagtgaagatattctcatatttggtttccaatattcagtttctcttacccattttccaacatttctctcctgcctgtttctcttcccccagtaaaaatgcccttgctctgtagactcagaacaaagctcaccacagttttagtggtctcacttgggtccaggtcattgcaatgggctatggttgggatgaaggaaaggaagaggtaaacagtgaagggtaatgttgctggtgtggtatctgaaagcaaaatgcctctgcaacctgaggattctctttcctccctggatctcttgcctgcctcttggtaggataccaggactccaggattccaggactcccccagtggcctcaagcacttcgtgttgtccagccatccttggcaggaaggactcttcccttacaggaagagtccttggtgttttgctttgtgccttgttttggtggttgtgggttggggtgtgggtttggtttggcttttctttttttctttttaatggctctgcatgagacatattttataaagttctacattttgctccagggccctgctgaacccaaccaggaatcaagcagaacatgtgtggtcctgtccgagtctgtcactgcacgttgggtgcctttttgaaggttgccttttgtgggcctagagaatattggaacacgcatcgtaaaatgcagacatctgaacttgcatcatgtgtttttctaaaaagctgatctcaagaggttgcatactgcgtgattccatttatataacattttcaaaatgacattttagagatggagaacaggttagtggttgccaggagttaagggttttgggtcgggtgggtctggggtgggtgtgcctatgaaggagcagcacagggagatctttgtggtgatggaatcgttctctagattgccgtggtggttacgcagagctgcatgtgtgataaaatgacacagagctacacacacactgcaccaacctcagtttcctggctttgacattgtactatggttatgtaagatgtaatcacagggtggaagacattgggtgaagggtactcaggacctttctgtactatgttttgcaactttttgtgaatctaaaactatctcaaaataaaaagttttggccgggcacagtggcttatgcctataatcccagcactttgggaggccaaagcaggaggattgctggagcccaggagttcaggaccagcctgggcaacacagtgaaatccagtctcttaaaaaataaaatacataaaatcaaataaaatgaaaaaagtttttaaaaataccagggacagcaaaattgggttgattgaccaaatgatgggcccttgttttacatgcgatcaagaatgagggaaacaggctgggcaaggtggctcatgcctgtaatcctagcactttgggaggctgaggcgggtggatcacctgaggtcaggtgttcgagactagcctggccaacatggcaaaaccccatctctactgaaaatacaaaaattagccgggcgtggttctgtgcacctgtaatcccagctactcgggaggctgagtcaggagaatcacttgaacccaggaggaagtagagtaaaagctttcccaccagctgtttttattttttattgtatgccaagctcatatgaatgagaattcatcaagcatagttgagagaatttagtctggaattgagattcaagactcaagctggtttccttttgtcataggactccctaggactcagtccgcttggctgaaggatggtgctctgaataggctgctggggaggcatattgcttatgcaattgcttatgtaagctgagtgcggcggctcatgcctgtaatccctgcacctcgggaggccgaagtaggaggatcacttgaacccaggagttggagaccagcctgggcaacaaagtgagatgcctgtctccacaaaaaaataaaaatgaaaacactaggcaggtgtgatggtgcacacctgtagccctagctactcaggaggccgaggtgggaggattgcttgagcccaggaggtggacaccaggattttgctaggcaacacaacaaggccctgtatctataaaaatagaataactgtttatgtcttcctaagagagtttttgggttttgttttgtttgaaatggagtctcactctgtcacccaggctagagtgcagtggtgcgatctaggctcactgcaaactccgcctcccgggttcacgccattctcctgcctcagcctcccgagtagctgggactacaggtgcccgccaccacgcctggctaattttttatatttttagtagagacggggtttcaccgtgttagccaggatggtctcgatctcatgacctcgtgatccacccaccgtggcctcccaaagtgttgggattacaggcgtgagccaccatgcccggaccctaagagagtttttggataaagctttccaatcagggagtaaaaacagcacaagggatgaagacatgggacattccgtggggaatatagattggactcaccgctctgaggagcgacatgcaaacgggtttttcagttttaaactggggggcccagcagtttttccttggggtatcacttctagagaactccaggcacgtgcacccaagaagacctgctccagtcatgtggaattcgttctcataacaacaacatggaacccctgaggactggacaggtgaactgtggaatagacatacctgcagataccatgcagcagtgagaaagaataaactagatttctgtgtcatggcatggaatgaacaccaaggtattttattattagagtgaaaaaacatcctggaacaagatgtacaagatcaatagcgataacaacacattcacaaaacacatttgtaaaaacagtactgtatattttaatgaaggtgtgtgggtgtttgtgtttataagctatttatcctattaattgtggatacatctggtaggaggtagtgccccaatgtggctgtaatcttatctgaaattttaaaatgtatttacaaatatttttagatgttatttgggtaaccaaaattctattttaaaagaaaaagggccatgcagttcttatctcagcaggaggaggcacaggtggactagttggggtcacctgttgaggaattcctactaagtctggatagcaaatcccactctgaaatgccaacttcaggagagcaggaacttgtctgtctggttggacactgtatcctcaatgtctgagacagtccctggttctttgaaggcccttaaaggacaggggaaggggaggaaagatgaaatcaattagtgaaggagtagcagctttgctctttggtgtgctatgtaaacagcatcggtgattctaaatgatgggcagcctgactcaatgaatgaatcagtgaatggctttagtgtcagctgtgttcctgatccatttatctgccttctagcctttgcaaaggaaactgaatttgccttatttatctggggagatgattcccaacacattgcagccctgccccacaacttctattcaatgacacttccccatgttaagggagacagggtaggggaggatggaggtgtggacaggaggagggatttgtgatcacttccttgtggcttgtggagttcttccccaaagttgttgaagtgacaacagcacctgaatttcactggctggacccacagctgattcctactctaatttttcacactgaacacctggggcgtgatatacctgtatcaaaacaaaaggcagtctgcagtcccgcaggcaagggtctgcccacggctccaggtaggcatcttccagggcttgtgtgcagcaggagagaacgtctcttctccagcagttcatcttgggcctcccgttggccccaggtggctcacgtgaccaccaccctggagccaatcactgtagaccgaggaatgggagatgctaattgccaggctcagagcttgttagtagggtcagtcccagccaagccacgtggactgagagtcatggggagacctagggaaattaaataactcacaaacacctgtaaaaactgttacagtgactggtgtgtgtgatagagggccatgggcctgtgaaagctgcaggagggaaatcgcttactcagggagagcctggggaaatcctgccggaactgaggcctctgcagggtgagcaggagggactggagttccaggcagagggaacagcatgtacaaaggccctgtggcaagagggagtgtggagcgagagaaaggccagcgtgctggaatcagatattggacaaggagaagccagatcaaggctgtgttcggaactctttgctttatcttaagagcaatggaaagccgtcagaggttataagcaaggatgaggtgaggcgggcaggttcagatttatgctgtcatttgctgcacagagaacaaactggagggaggccccggtggccccagggaggtgggcaggggggctgccgtggtcttcctgggcagagaggatggtggcttggacctgggcgatggccatggaggtgaactttataaggcctggagatggattggacgtgagcattgaaggagagggagaagtaagagcaatcctgagcttttggtttgagcaactgcccccgaaatgggggaagccaagatggtttgtgattcacagatgtattttgaatggaaattgaatgaggctggtggaggctgtcagagacgtccaggtttgggccacagctgctgtctgtccagaagcctgtgattgaagtcagcaggctttgatttctcagcccgtgaaggatgctgggagtgaccctctccaaagtccccttagccgactggccatctgtcctctgcatctgacagacagggccaccatcctcagccaaggtagctggtgtactcacgggggtgtggaaaggtgagcggcccacccgcctgggaccctccatctgcttttgatccctcccagcctttgaagctgcccctgcccccaccctccagctgtcatctctcgggctcccccacttcttcccagtccccagggacaggggtggtgacaagggtaacaaatggcacaagccgcaggcagcagcaggccaagggggccagagggagggtgttcctgaatgcctctttcttcccgctccttcaggctgtcttctgaagtagccaggctatcagggttttgcaacaatgcaacaaagaaagaattttttttttttgtaaatgaattccatgcttttccttcctttcccttccctgccttcgtgaaagggaagctaagtctttctcctaccccagattccttgaaggctgtctgagttctctcttccttcccctgcatagagaataagctggtctccaatttcaggtaattgtgaggtggggaagagtggggagaatgtgaaggaagccttccccaccaaagtgcagcagagctcaactctgcccctcaaaccacaataggaaccagtggtttccgggtgatcctgatgacagtttccagtgtctacctggaatgaaacgaatggtgtgtttcaagcctttgtctgtgtgcatgcaaataatctcagctgccctttgttgaatacccactcactcgtgccttctctgactcatttttctcagaataacctggcggggagggtattattttctccatcttatagaactgaggctcagataagtgaaataacttgcccaaggttacaccgctgataacgacatagctgggatttgaacccctggagcagataacacgtctggtgctctgactgggtagcttagtagactttagagctggatgggccctgagttgaaattgtgatccagagctatttgcaagctgtggttaagagcacagatctggagccagatcacctggttgagaatcctgactctaccactgactagccaggtcagtctctgaacctgtctccttatctctacctacttcataggatgaaacgagccagtgcatgcagagagatttaagcctcagcgtaaatgctctgtaactgtgagctgtttttatttctagtatctgtaaactaagcaatataattagggccaggttaagacctttagcagcctcaaacaccagagactggcctctctcctccattgtctcctccaatacaataataaaacggtgtggttcgtaagacaaaaaactcgctgtgctgaaattttttttacaattttgtttagttttgttttttattgatacataatagatggacatattttcagggtgcatgtgactgtttgatacgttcatataatgtatacagatcaaatcagcataattgggatttcatccccttagatatgtatcttttctttatgttagcatcattcaaattactctatactctggctattttgaatgtgtgataaactattgttaattatagtcaccgtactgttctattgaacactagctcttattccttctaactgtatatttgtacccattaatcaacctctcttcatcctccccaccacccttcctggccttcagtaatcacagtctactctctatcttcatgagatctacttttttagctcccacatgtgattgagaacatgccatatttgtctttctgtccttggcttgtttcacttaacataacgacctccagttccatccatgttgctgcaaatgacaggatttcattgttttttatggctgaataatattctagtgtatatgcataccacattttctttatccatccatcaattggtggagtgcgctgacatttgaaaagcttctttttagatcctcatggcagaacaggataagttcaccaaacaggaatgatttcacgttttcttggtgtctagactttgctcagacttaaatctgtgtttagtcggcctttgaggaaatacaggacagatccttctatctcccagcgtggttgagagaattaaaagagatcatgtaaatgtgatcaggaaaattgcctggtgtataataggtgcttgggaaatgagaaccatgactagaatttttggaagggttttactaactctggaaactgagttgccttgagttgcttgttcacattcctatactctgtggctaatagtttgcttctgcaagtcaccagtgcctgtagctgtagctgacagcaggaaagaacaattgtcaggttctcaagtcagggtcatgtttactttgtgaagattaatatttctgtagctttggctttattagtgctgttcatttatttgcctccaaaggatggtgtgttttgattgctataggtattttaattgctataggtattttagattttgcagatctaattctaggtctaacagagccctagaatcagtcaagtccctttcttcatgcacattaattttggaaaaaataaacttttaaattatcatatattggtggattattttatcattattgtatgtccctgtaaatctctaataatggtttttattttaaaatctatttggggtattgtgttgtattcatattattgaatccttgctttgaatcttggtatgtctttatatttaaaaggggtctcttgtaataagcatgtagttaggtttttaaagtcagtctggtgatctttgtctttcaagtgttgtatttattctgtttgcatttactgtaactaatgtaatataaacatacatgaaatgtttacatttattattattctttaagtggttatcctaaatattataggatacattcttgatatatctaaaagtttactataaattagtacttttaccatttccaagaaaatgcaaggtccttaaaacatgttaattgtatttatctatcctcctgctcacatatttacccttttatgttgttctttatctttgctgaattttcgtgtttccagaatattcttttttagtgcaggtttactgatgggaaacaatcttaattttggtttgtttcattttgattttgtcttcattttgaagtatttttttgctggcatagaattccacagtggcagatgaaattccattgttttgtggtttccatcaattctgctgagaagctgcttctcagtcttattataccttctttaaagattgtcttttattccccctctgactgcttttaagattaatttgtgcacatgtgcagtttaaccatcacatacccaggaatgcttttctctgtatttatctttgggattcacagaacttcttgattccatgacttgatatctgtcatccatctggcaaggtcttctgtcagtttctctttaaatattgtttctgacttgctctctctctcctctccttctgtggctcctattacatgtgtgctagatcttttaccatgtaccatgtttcttttatgctcttttaaacctgtttttcaaccttattcctgagatctgtttactgacttaccttccagtttgctaattctttcatctgctacatccagtctgtagttcaactgatctattgagttcttaattttaattatttcatttctcagttctgtaatttcctttttttttttttttgagatagagttttgcttgtgtcacccaggctggagtgcaatggtgcaatctcggctcactgcaacctccgcctcctgggttcaagcaattctcctgcctcagcctgccaagtagctgagattacaggcacctgccaccacacctggctaatttttgtatttttagtagaggtggggtttcaccatgttggccaggctggtctcaaactcctgcttcaggtgatccacctgccttggactcccaaagtgctgggattacagatgtgagccaccacacctgaccagtaatttccatttttaaagagcctagatttttttagcagcattctcatcttaaatcaatttttttattatattatcacagttgctagggactccgtgtttgacaacttcaatagcagaatctcgtgaggtttttgtttttgttttttgtcttggtttttgatcatttggttttgtctttttgcatgcctggtaatttttttattgtgtataaaacattgtggagactctggaagatgacatctcctccaaaagaaaagtttttctgctggctattgatgatagtagaggcaaatcactttggtcaaatatgagattgagatgactcaaggcaggatctattttgtttgctgttactccaaggaagtaatcctttagggtcccagttaaaagttttgagtgtttctcaaggctcctcatccttattggccatgaattccaatttttgccttcctgtaattaggcaactgcaaaaaagctctgcttaatttcttgcctttatagctaccccctttttgcttggtttctctgcctctcaccgcacccagcttggatatcagcaaatgcctcaaggctaataactttcaacaatatgagactcatacctctgtggttctcatatttctacaatctttgctcctgtgtcctaactactttagtaatcctgaactccagtttttttctccccagccccataagactggaaaactctaagctgttgctttttttcttctttgcttataaactggcaagtgtcttgaggggaaaattgatagaggtcaaacttggtctgtttttcatctctctgggatcttgttccctcaggacctgccttggttgacttccaatcccttaagacaatattttatagctgttatttttgatcatgatagtgaggttgactaaaaatacaagctatcccgtcgtagctgggaggtgcactcagttggacagtttaatacatattaggaaaaatggcttatttttgttttcttcaatatggagaaaaattaaactttaaaccacataaaaaggcagactctaaatgaattgaagacttaaatatgaaaggtaaaattctaagtgaatagtttaacatgtagacaaattttaaaatcccaagaatagagaaaggatttttacacctacaaaaagaaattattaggtaaatatgtaaggattttttgttctacaaaagataatagaaataaagaaaacagacaaatgaaagactaagagaagaaatttacagcattcgaaaaacacattgaatacctagactctgtaatgcactccagcaaatcagtaagaaaaaaaaaaaatagaaaacccagtagaaaaatgggcaagcataaaagatctgaacagacaatttccaaacattcatatggcccacaattatgtgaatatatgctcaaactcactagtaatcctagaaatgaaaatcaaaataactatgagttattgctttccatgcatcagtttggcaaaaagtagaaagtggggccgtgccaagtgttagcaggaaattgtgaaactggaacccttatgtacttctggtggaatctagaatggcacaggagttatgaagaacagtctgctagtacttgttcaagttcagttcacatatactccataacacagaaatcctccaccttggctataaatacattttaggaatgtgtgtgtatacatatatatagggagagatactgcattttaaaaaatgaagatgaatggagatgttcattgcagcattgtttataaggtggctgagagataaaggctacctagctgttcaccaccagggcaatgcataaattcaatagagtgggtgtgcagtatagaattatagctacaagctagatatgcatccagtaacatacacatgtttaaatcagtgcagactgaaaataaacagccttctaaacagagtgagatattgtgcacattattcattaaattaaaacacatgccacacataaaacaacatggcatcatttataaggaaacatttacatatttaatatgtcagagtcattgtctagggcatggtggaaaataaggataaatgggaacttttaaaaatcttgttggaagaaggtgatggctcaaataagatttccttcctccctgtctctctctccctctgccccttctttcctcccttcctccaacagatgctaactggatgatggaatgaacaagattctgtgttaagtgctgtggaggaaataaagatgatttccccattggcttggccttcaagaaccttaggcaagggcctaaggtgaatacaccagaagccttagtagcaatactctgtcccagagttcagactcataaacacattcctgctctgcttaaaatcaacaaatgctgttttggatgtgtaagagctcttaaggatgacagcaacactcagtaaagtaaataagctacgtgactgaggccagaagtgtcacactgccgtctctttccttagcaggcttttctgataatacatatgacatagctctcaaatgcaaatgcctatagggaccaggaggaaataccaatggaaaaagagggtcaaatttaagagagtagggagtggtggggactgtgacaaaatggagcccatatgccttgacttaattgggccgccactgttcagtgccagctggttgctgccatgcaagaataaggcaatactcttgtattttcaagaaaagccaaaaatctagatttttatgtgaaattgtctcatttttaaatattggcaactacctcaaatatttttaaaccctagggagtggggaaaacaattcattttgtttttaaccacatttggtcagttggctaacaatttgctgcttctaatactctcatagcatctggatatctggaaactagtgatattttttaacctcattgtttatttttttaacctttcattatttgcacataccgaaaagaatgaagggaatgagtttagataagatgcaaatttctggcacctgtagccagataaaagatacaatgtctaccatttgctaagcaccatacaatatgctttgatgtattagagggagcaagacacctaggcctctatcctggagtgcctgtggcatttgagaaacaagaaaacaggcacccaggatgcatgtatacgtggggacattttaggactcaacatttatataaacactggagatatatatataatatatctctatatatctaatgtatatattatatattatatataatatctctatatatctaatgtatatatatacacattagatatattatatattatgtattatatatcgatatataatatatagatctatataatatctatatatataatatataatatatctaatgtgtatatatatacattagatatatagagatatatatatctctctccaatataaagatataaacaatagagctgatttgtgtattagcccattttgcgttgctgtaaaggaatacctgatactgagtaatttatttcaaaaagagatttatttggctcacggttctgcaggtggtactagcatggcatcagtatctgttccgcttctggtgaggccttgggaagcttttactcatagtggaaggtggagggccagcaggcacatcccacggtaacagaaggcgcaagagagatgcccgactcttttaaacaactagttcttctgtgaactaatagaacaagaactcactcataccatggagaggacaccaagccattcatgagggatccatccctatgacccaaacctctcccactagccccacaacactggggatcacgtcacattttaacatgagagttgaaggggacaaagtccaaaccatatcagggtgggattctgtcatcagatcaaaaagtccatgtacagaaagtacttcctatgtgcaagcctgagataagggctttcttatttaaaaattattaagtgtttcaggcatacaaagatgggtaaaacatacaaaagtagggtacccagcatcctgcttaactgatacaggggttggcaaacttttgctgccagatactaaataccttcggctctgcaggccacacacggtctctgttgaaactactccgcttaacactgtggtgtgaaagtaaccacagacaggatagtaaaccagtgagcagggcagtgttccaataaaactttacctatggacactgaaatatgaatttcgtgtcattttcacatattatgaaatagtatccttcttttgattattttgcaaccatttaaaaatgtgaaagccgttccagacttgggtcacacaaaaacagctgtgggctggatttggcttacgggccataggtagtgtcagcccctgaattaaagcactacatagtctgagccccccaggtgccacttccaaaattacatcccctcctacccccagagttagccattctcttgaaaacagtgttgatcattcctgagtgtaattttgtttttgtggaatgcatctgtgtccattaacagtacagttggttccaattcaaggattcagttaactacagatcaaaaatattcggggagtggggcaagcacagtggctcacacccgtaatcccaacactttgggaggctgaggcaggcagatcacctgaggccaggagttcaaggccagcctggccaacatggcaaaaccccgtctctactaaaaatataaaaattagctgggtgtggtggtgtgcacctgtaatctcagctactcgggaggctgaggtaggagaatcacttgaacctgggaggcagaggttgcagtgagccaagattgcaccactgtactccagcctggaagacagagtaagtctctctctctctctctctctctctctctctctctctctctctctctctatatatatatatatatatatatatatatatatggggcaaaaaaaaaatacagaataaaaataatatatgttttaaaacaatgcatataacaactgtttacatagtgtttacattgcgttggacattataagtaatctagagatgatttaaagtatatgggaggatgtatgtgggttatatgcaaatactctaccattttttataaggtacttgagcacttgccaattttggtgtccatggcggggggcgggggtgggtcctggaaacagccctcctgggatactgaggggcagctgtatttttgaactttatgttgaataagcatttaagttgctattaaaatagtgcttttttttacatgaatcatctttttaaatcttcaccgtgaccattttccagatgagaaaacttttgacttagagcagtttggtaacttgctcaaagtagtgggtagcacactgggatgtgaatttgcaacctttttacaatgggatctgagtttataagcaccacaccagcgatcgctacgttgtgtttcattaaccaagtaataactgatcttgccaaggatgaccttatgataacgacgtgctcacaataaatttagcctttctctgaagacaactgcaggttaaatgttactggttgtagttcagaccttggaaaattgctacgccatgtacagtggtgtgtgcgttaaccagaaaccttattttctaaacccagtgggtgggaatttattaatatttattttgagacagggtctcactctgtcacagaggctggaaggcagtggcacgattagagctcactgcaccttccatctaccctggctcaggtgatcctcccacctcagcctcttgagtagctgggactacaggcatgtgccaccatgcccagctaactttgttgtatttttttgtagagatggggttttgccatgttgcctaggctggtcttgaactcctgggctcaagtgatctgcctgcctcagcctcccaaagtgctggaactgaaggtgtgagccaccatgcctggccagaatttagaaggagtgactaccaacatggtgcaagaattagaaatgttttcaattaaaaaatgagaaagaccaaaggagacctcatccctactctcccctgcccgccccccataacatattataaaaatcatgggtgattcaggagccagtatgttctctcttggtcaggtccacagtgatgagctgttgagtgttgccacctagagagttgttaatgacacttacgccttttgagcttttctccgtccatgcaagtagtaccgtgtttgtttgtttggagatggagtctcattctgtcgcgaggctggagtgcagtggcgcagtctcgactcactgcaacctctgcctcccgggttcaagcgattctcctgcctcagcctcccgagtagctgggactacaggcatacgccaccacgcccagctaatttttatatttttgttagtagagacggcatttcaccatgttggccaggatggtctcgatctcttgacctcgtgatccacccgcctcagcgtcccaaagtgctgggattacaggcatgtgccaccacacccggcctgtttttctctcttaaccacagtcaactccacgttctccccaagcctctggcttttggaaatctaaatccaaacgctccctctctgcctgtctgtctctttctcagctgggaagttgccctagtttgctctggctcatttatatgacattgaagagagaccaaaatataatttttctaatggcaaaatacagcaagaaggaggggaatgttttaatcaactgggtgtattctccagcggggagcaagaacttcattttaatttctcatttccctttgatgaaaagttgagtgaatttttatcatgtagaatttataagaagtctgggtttaggtaatcagttgtaatatttatactcttagggaaagaaataggaatcattagcaagcatgcataattaatgaataaattatatttccctttgttttctttcaggtacaaggaaatggtagaactagtgatctcacccagcctcactgtaaacagcgattgtctggataaactgaagtttaaccgtgctgacgctgctgtgtggactctgagtgacagacaaggtaggcttcctgctgtgagtttgggtcaacaggtgtggtggtcctaggtcaccctgagaatatcgtaagcaacagacacgcatcctttccaaagtactgtccttaggacaatttctccccctgccatttaaatgcttgcctctgaaccaaaactttggcatacatctctaacaactctgtctcatcgttagaggtaaaaatgtgctcattcgtgtcttgaacttcctttcttggtctccaattccaagaaatgctgacaccaccacggatgatagtcactttggggcgtgtcccaggcccagcccttggatgtgttttgcagtgtctgtttctggctctgagctctgtcctctctactctgctctgccatccccttgtccaagcaggcgtcttgcttacaggggtttgacattagggcaagaactcgtctgcctcttgctttcaggtcgggttggagtcaaggaagcagagaagaattaaagttgtttaaaaaactattggcaaatgatgcagtcgaactagttttcactagaacaattccagctattgtttgttctgtttcagatctgtcagccttcctggtagagcttggagttagcaaaaggcattaagctattatgtttaaccattgggcttaaccctttctttggccagctttgggatttgctgctgttgtcctgagaccccctcgttgtttttccttcattatctgtttgacaccagctcatgggacacaaatgctatgtaactgtcgtggaaaaccaaagtgacacgtatctagtggaatataacatcacaaggaattggctttgaagccaatccaggcttccatgagtaattattgctgtcagcaagacaatgacatttctccttgcatgctggttacagagctggaactgcgctgatgaaagtaccaccagtggcttgggctctcatgccaaaactggatggtgaagaacataccctcattcttcctggcactttggaccattcgtgtaaactgcccaggggcctttgagagtttgagaaaatttactgagccccgttcaaagacattcatcattttctttccaaatagagacacaagtcaacttaagtagagacgcaagtcaactgtcttcatttgagagcccgtagtaacaggaaaggacataggctgctcaggggggaatcccagcccactgcttctcagccaaatgatctcaggcaaactgtttaacttttctgagcctcagttttctcacctgtcaaatgggggcataatggcgtacttcatagggtgctgattgcaagaaggaagtgaggtgatgggatgtaaagtgtctggcacaccttgggggcatggtgcatggttaaatgtaccattccattgtcactctcctctgaaccaaataaccacagtaaattcaaaaccatggttgcacacagggcagcccacagccacatctggccctgaagtttgtctttgtttggtttacactatgttttaagtaaaagtgaatttgtaaaaattgggagcattcacataaaaatctggagttctggtttatcttaaaagactgaaggctggctgggagcggtggctcacacctgtaatcccagcactttgggaggccaaggcaggcggatcacgaggtcaggagttcaagaccagcctaaccaacatggtgaaacctcgtctctattaaaaatgcaaaaattagacaggcgtggtggcacacacctgtaatcccagctacttgggaagctgaggcaggagaattgcttgaacctgagaggtggagtttgcagtgagccgagatcgtaccattgcactccagcctgggcgacagacgtgagactccgtctcaaaaaaaaaaaaaaaaaacgctgaaagctttagcaaccctgggcccccacattccccgctggctgccaccagtaggagctgagaggctgctgtcctgtagatgaatccccgcctctcccttttgtccttaattgttatgagcacatactttctgccaggcactattcaaagcaacataaatctagattcattctcctcctccctccctgtcaccatcagaacaaacactcggcacttgtcgtgtcccagcattgctctattaactcatttaatcttcacaactctaaaaagtgggtactgttattatccccattttacagacgaggaaaccaaaatgcagagaggttaagcagcttgattgagatggcacaggtgatagcccagatttgaacctagatagtctgacttcagagtttattctcctgatcagtactctgtactatttctcatttaattattatacaactggtaggctatgagcccattttacagacatggaagttggggcatggaggagttacgtaaccaggttaaagtcacaccagaatcaaacccaggcactctggttccagagttcccacttgtaaaccacttctaactcactttctgccaagctgtaagagtctccagaccctggatcttcaattctcccacagtggtgaaatccacagacacactcctttttgtgacttggagctgtcagtgccctttctactgccctggaacaatctggctgccatggtgaaggctttgagggtggaagcgatgaggcagagagaggttgctcccaaattcagaacaggtagcgccagtgaggtcaggttacacacacacactttctttctcatggggcaggtggtgagctccagagactctgcaggggacattccaccctggagcatgacccccaagtgctggattatgcctctccccctgcctggcctactgttctccctcctcctgggccattccttctattacagagtctttactaggtggcttcaaaggtcctactcaaaggaggacccccaagagtcatgagtcacaggacctgcactcagggggattctggagggagcatggagccaagaagccccccagtggcttccattgcattcccacctctgcttcttaccagctgtgggaccctggctagtggcctaacctccttgagacccatttgccccatctgtttaatgggagtaattattccaccgacctcacagactcaatgtgaggatgaaatgagttgaaacagggagtggacttagtgtgcttaaaaagtatagaacaagatctgaattccttatccttggccaccaggccccacttgtctatccctggaagcctcccaaactcatctccgtccctattgcctttgctccttgggcccagcccctggccccttttcctttgctttaactgagaagcatgattctgccctccgagcctttgcatctgctgtttcctctgtctggaccagtcttcacccaggctctgcaggaccagccctccctcagttctcatcagagaggtctttcctaatgaaaggaactgccccttccttcattcatttgttcattcatttattgaacaaatgtttaatcagccatgtgcttggcatggttttaagtactagggagacagcatagaaaaccctatcctcatggagcccacgctagggtgctgacaaagcaaaaagctgacaatgacgataaagaagcaaagtatttagcacgttgcatagtgatgcttgctgtgaaggaaaaaggcaggggaggagcatgaggaatgcaagagtggagggttgcagtttttgttagggtggctagaaaagaggtccctgagaagataacacttaagacctgtaggaggtaagggagggtgccacatggctacacagaacaagagccgtatgcacagagaagacagcaagtgcaaaggccctgaggcagcagtgtgctcaaaaaactttacatatattaatacaaacatatgtacatatgcatatttaaatttctgttcctgtttagcatgcaacttagtgcctggctcatggtagatccttaaaaaattatttctgggtgagtgaaggggtaggtggatgaagacagaatggtgctgaggaacccagataactttagggagatattggttctgaatccttagtaaagtttccttcacttccccctgcctcattttctacatttgcatcgtactgatgacaataatttccttactgcgttgttgtggagaataaagagatcatgctcatgcagtccttgccacagtaaccctggtttgtttgtaggaaccacttgagaaatattacctattattccttatgattcaagggaaaaatggatttgaattgattgtatcctgtctctgggaaggggtggtggggagttcccctgaatagaggaaaatttttcttttaaaatgcacatgcatttttcagaaactgatgctctaatctcattgtttccaaggagaggtgaaaccaccaccctacgctacaagctgggctgtcagctgctctcacttcctgcacctcctctgccctgggcatgacaagacctcattttcagtttcagtctcaccggttccaacccggggctgacgggttttgattcatttcatccaaaccaggctgagctgcccagagctttgcccaggtgctggcctggggaaccacatgtcagcttcatccttctcacctttaaggcttttgtagccgttcacacccagaacaacctctacctgtgcagaacagaaatcccgctttgtgggaggaaatggtgctattaatcccatcgtggcctccacaggtaaagagcttccactgatggcagtagctcacaaatgtcatagtctcgagccactttctggcgtatattcagaccacctctactgccacttggtactaatttgttcttttttttttttgagaccgagtttcgctcttgcgaaccaggctggagcgcagtggcacgatctcggctcactgcaacctctgcctcccaggttcaagcaattctcctgcctcagcctccggagtagctgggattacaagtgcccaccaccacacccagctaatttttgtatttttagtagaggcagggtttcaccatgttggccaggctggtcttgaactcccgacctcaggtgatgcactcgcctaagcctcccaaagtgctgggattagaggcatgagccaccgtgcctggcctgttgtttctttaaaacaactcctttgaaataaattcattttaaaaggatgacttaagccagttccagaaatgaaacgttatgactttgatggtcttgttgtgattctaatgtacataaaattaatttgcaacgatttcaatcaaagagggagtatttatagactccctaaaatcatcgcagtctgggacttgcagcctcattcctttctgtcctcagtggcacctcccgcaagagacaaagggcttgctcatggtcacagagcctctcagtgacagtcagaattggggcacccacttctggatgcctagtgtggtgtctttccagctgtccctgtccctagtatgggagtgatttaaatcacccacacaaggaagatgaactgatacagtttacagacatttacctttatagcagagacctgcctggagacatctcgctggcactacaaattgtctcatctcactgggggatcccttagaagccggcccctggggtccaattaggcaacataacagccgttgctgctttcagaatcattagcttcttaatcctcccagtgagaggtgaaaaaagtgtgaacattcaaattgtgctcatggatttaagtggcttaaccaagggcccccaggagagtggaagctaataatagctcctctgtgctgagcacttaaccatttgccaggtacctgccccatctgcatatgtgcaagatattgccccaatttgcagatgagaaaactgagactcagagggaagaggtgaaggacacaaggtctcatggctgtattgcagcacagccaagatttaaatttggatctgaccccttaagcctatctgttttctttggaaagaacatcaacaaattatgagaatgggttgtagatttggcctacggtaggtgcatgataaacacttgttgactgcgtgaatgaatgaaacatggtgtgtatcctcgggtaagttgcttcacacagtcactcacatacacaattgcacataagtatgcactcagtatgcacagactgaagctttaatttcctctcttaaaactggatcttttgctttgcacatttatattgtctttgtggccccaatatgcacttgagtttgtgtcttctggaatggagatttctttttatgaaccccaaattgtgataatgcttagtgatgtgtagttttgtattagccagtggtctaaactcttactcctcaaagtgtggtttgtgaacctgcagcgtcagcatcacctggaggcttccttgaccaacaatcagaacctgtgttttaacaagatccccaggtgaatcctggttccaggtgcactggtctcaaatgtccattgcttcctttgcacctcgttataattgcagttaagtactcatttgtgtgattgtttgtcatccatctcactcactagacaggaggcttcgggtccataaagacagggaccctgactgccttggctcactgtattagtccgttctcgcactgccataaaaaaatacctgaaactgggtaattttaaagaaaagagatttaattggcttacagttctgcaggctgtacaggaagcctggctcaggaggcctcaggaaacttacagtcatggtggaaggcgaaggggaagcaggcacattttccatggctggagcaggaggaagagaggggggtggcaagtgcgaaactcggtctcaaaaaaaaaaaagaacaaattagtaccaagtggcagtagaggtggtctgaatatacgccagaaagtggctcgagactatgacatttgtgagctactgccatcagtggaagctctttacctgtggaggccacgatgggattaatagcaccctttccccccacaaagcgggatttctgttccgcacaggtagaggttgttctgggtgtgaacggctacaaaagccttaaaggtgagaaggatgaagctgacatgtggttccccaggccagcacctgggcaaaggtctgggcagctcagcccagagaactcactaacgtgagaacatgataaaacttactcactatcatgagaacaggatagaacttactatcatgagaacatgaagccaggggaaaatacacccccatgcttcagtcacctcccaccaggcccctcctccaacactggggattacactcactgttgtaacccagttctgaactcatgcctggcaatgaatgaatgagctcagctgatccctctctcctcacccataggaagcttgggaagtagaggaggctcagagtttacaattcagaaggaaatagaggaggcactctaccctccctacttggcagccagctggcccgttatgcatcagccacagccccttcatcctgtgggttcattctcaagccctgggggaggatgaagaaggggcaaagctcagagtaaacagatttggttctgttgggcgccaggtcattagagctgctttcactaccagcaaagtggacctaagttgccatcaatgactcctccattgaccttgacctcatagcctacatggtccaatatgaatccatcacggcaagttcaagggcagcaacaaggttgagaacagaaagctatgatcagtgggaagtccacctccatctgccagacaccagatcccaaagagggcattgctgccttcatcaccctagagatgcttggagctcatctgaagaatggcatcaaaggggcatcattctgtcccttgtgctgatggtctgtgtttgagatgagggtgacctactccctttagatttccagcatgccatctgcttgttcccccagaagggtctatgacaaccatggcatcataaaagtactcatgaccactgcctgtgccctctctgcccatctggcaagctgtggtgcgatggccatgggactgttcagagtgtattcagtggcactgccaaggctgtggcaaggtcattcctgagctgaacaggaagcttgctgacacagcctcctatgtccccaccctcagtgtgtctgtccaggatctgacctgccatctagaaaaagctgttgagcacagtgacatcaagaaaatgtgatgcgggcacctggggggtcattgaaagaaattccgggctacactgaagaccacgttgtcgcttgcaactgtaacagtgatgcccacttctccacctgtcacactggggctggcattgcccacaaccaccagttggtcaagcctacttcctggtactgtgatgatgtttggctacaacaactgcagggtggacttcctggtccacatgacctctgaggactaagggctctggaccaccagcaagtgcataagaagaagaaaggcgttctctgctcttgggcagtccctgcccacctctgtgccaaagcagagaatctccacccttgacagtgtcccatccaaggctcccagaggagggaaggagcttagagagccctgccttatcatgtgtgtttatgataaggattatcaatgaagtccacaccaccctaaccatggagaaaggaagcagaaagggaggcagaagatcactctacatagagtttaatacactcactctccagtttctcaattcctccaggtgtcctgggatgaaaaggttaaatgcgattgataccagcagaaaacagaaaaaagcctgtgttttttcaaaaatcacacaattgccaaaggaaaatctctttgcacttacaaatgcctgtttctcgcttgcacagtcttcctgaggttgctggggtgggaaagggagagtatttacaggtctgcgtagtgggggaggggaacctgtctgctggggaaggcaggttgctcaattcagaggaactgggtggaagcttgaaaaggagctgggtgaggcaaacatgcaaatcatgccatggagattggcagaaaagacgcttgcctccaatttatggaatgccaagttaattcgagcccataggaatgttgttcccatagatttagatttttatgaatatatacatatttatgaaagaaaacatttaaagtgtttaattcagtaacttatgcagtactaaatgcactcaagtcatgggcttttacgaggaatgagattgtggctgcttcagaatgagacagttcattcttgagccctgtgggaggatgaagaaggagtgatggggtacaggacaccccgcctaggagcaaacccagggtagggaaatcagcattgagtgagcacctactgtgtgccaggggctttccttgacattcggctactgttgttccatccttttctttgaatgtgatacatgatgcgaaatatatttctgcattgttgaatgcacgtgcatgcacacacaacacattctcacacctggacctgcaacaaaagggttacacaattccttcttactatgggcaatacctgctgccatcgtatatcataaaataggcaattctccttttcttaattccagttatgactctctaaatgaacttcaagaccaccacccccgccccaaccccagtggtttgggacttgaacagaatttggctcagccagggggagggcattaagagtgttgaccttggactcacacagcttttgggttcaagtcccagttcccttgcccacggttgtgtgacttgaacaaggcacttgaccttcggagccccggtttcttcatctgtacaacggggttaatggcatcgcgtgctcagagcgctgttgtgaggactcaatgagagcctgtctataagcagttaacaagggcctggcacatagtcaacctctaagtgaatgccagctgctcttatgacaatgactgtcatcgtcagctgtagtgtcatggttgagaagacagactctggagccagaccacctgggttcagatcacagatccacaccgtacttcctgtgtggccctgggtgagttacttaagctctctgtgcctacagctgttcatctgaggatgagaatagaacctttctcacagggtacttatgaggattaaaataattaatccaggtaaagaatttagaagagagcttggcacgtaataagcactgggtaaatgatggctatcagcatcatctcatttaatcctttcctgtccttgcaagataagtattttcatcctcattgcacaggggggagccctgaggcccagagatctaggaacttgcctgaagtctcataactaggaagtggcagagttgcaagtgcacgttggtctcctgagcctccagcgcagaggctgaggcaggctcagagctccacagccttaggttgtgatgatgacgcagccactgccctacagaacagggagtgggcattggcaggttgacgctgttcccatcagtagacacattatctagaatttgtccaggactctgcagtgaggacattgagttgcattgttcaagatgacggagcacaaaagtacttcccagtgaactgtccctatgtaaaattatccccgggcaaacgtctctcccagcttaactctgtcaccttttcgtcaccccctgcatatcgcctcccatcaatgattggacattgtgtgctgagtgattgggtgttaggtacttgcatcaggagcccaggtgtcatccatctctctgctccaccaccctagatggagcttaggagatgatcgaagtggttccttcccctaaagtgttggggccagctgcacctgcactccatggactggaagtgaggaggcaggggaggaacatcaaagccatgtcattagaagaagggaaatggaggttggatgagcaaagccagcctgtgtctgccattctggggttcttggggattgcttttgaggcagggaagggagcggttttccatccaggagtggaaatggcaccagcttgattcacttcctagttgtgctgctgcctggtcatgtgacttggctcaagcacattctttctgtctctttggcctcagtttctccatctgtacaatggatggagaaatggactctactctgatgtttcaaggtgctatggattctttagatgtcatttttccttaactgcacagagacgaagtgcacccagaaagggctccgaactcctcaagaagaagagtgctgagatgtggcgcctcagataagcatctgtggtggagaaagccgcgggcagcacccctccaagtctgctcctgcttaagtggtgtctgaagtcaccacctctgcagaacatcaccctaatcgctaaaactcttccaatttttctttttctcctgcaggcatcaccaaatcggcccccctgagagtgtcccagctcttctccaggtgagtgccattcacttgtctcctgctcacatgcccaccttttcttctttcttggaaggtagaggttaagagagagggccctggagccagattccctggataggaatcccagccgtagcacttcctagctgagtgagcttgagcaagtcactccacctccctgggcctgagccctcccatctgggagcgggggacagtcatgctgcctgcccccacgaaaccagcaaaagcaggtaaaacacacttagaatggggcctggagcagagtgtcctcagagtcttagctattattttcttctttcttctcttcattcttttttttttttttattcttttctttctccccttcctctgctttcccatgcatagggaatttcttaatttttccctccctttttgccactgtctttctttctcctttcctcattcctttcctttcccttcttttcaatctcccttctattttttttttctccgagacagagtcttgctctgtcacccaggctggagtgcag[134 bp omitted]tctcttccctcccctttcgtcccccatccttttctctccacctctctctcccttttcccctccctcctttcatcatttctttactttattttaagttccagtatacacatgcagaacatgcaggtttgttacataggtaaacatgtgccatggtggtttgctgcacctgtcaacccatcacctaggtattaaattcgacatgcattagctattcttcctgatgctctccctctcccctacccttccctaacaggccacagtgtgtgttgtacccctccctgtgtccatgtgttctcattgttcagctctcacttgtaagtgagaacatgcagtgtttggttttctgttcctgcattagtttgctgaggataagggtttccagcttcatctgtatccctgcaaaggacatgatcttgttcctttttatggctgcatagtattctatggtgtatctgtaccacaatttctttacccagtctatcattgatgggcatttgggatgattccatgtcttggctgttgtaaattgtgctgcaatgaacatatgcgtgcatgcatcctttcttcctcctctaccattcacacatcactcctcagtacctaaccccacactgagccctagaaactcagagatggatgagatgcagtctctgcccccggagagctagtccatattgatggatgagacaccttccaggactggggctgacatctccagctcaaatgagtttcttatgcattttgcagcaggttcccccaaataaccctttatcgtggcagtagtctaaaagaaagaagggcatagggacatctgtttataattccataaacttttgcattcacctgctgtgaggcctcaggtggaagaggaactctggaagcaaacaggctttagcaaaagtgatgtaaccaaaatggaatcagatacagattggggaatctcatcaacatttacctgtacgcttaacccagttgtgacagttagaaacatgatagttgtggtgtctgggggagggtggcatagtggaggggttgagggtgtggcctctggagccagggttcaaattctctatctgctgtatgcttgtggcgtgttattaagtctctctctgcctctgttttcttacctgtaaaatggggatagaaacaaaaattacctccaaggcttatcacagttgtggtggagtttaaatgagccaattcacatgaagtaaataggacagtgcctggcacgtaggcatgagaattgactacctttaccactaagggaagtggcccttgtaggcattgttgcagacaggatgtgattcggtctcaagaggtggctgctgctcaaatccagctgatagcaccacacaggcgtgcagacccaggtacgctgaagcacctgcttttcaggagaaggaagacaaagcgagtgtgtttatgtgcatgcctgcatgtgtgtgtgtatctgtgcacgtaacctcctggttttcaaattttaacaacaatttcaaattaggaaaaaaaataacttcactggtcaaagaaattatatccatggatctgtggattggatgtggcccctgggccaccattttgctccctttgtgttagaacaactgaccttgactttatttattgctatctgcagggctggatgaatcctagtcctgtgaggaatagcagattcatggttccaagcatgggctctggagtcagactccttcatttaagctctatatttaccactttgtagctgtgttttcagctctctgagttttggtttcctcatctctaaaccaggagagataagagcctccaccccagagatttgataagagcatccatgagatataatgtacataccaggtgcatgtgacacaattcccaacccttagtaaaaaacacaatgcttggcagcacccatagtataaatatcttaagtaaggagccctgtacatcctagcccattatagaacctgttgttctccatggagtagagaagtcatttgtggtctttggttgcaagcaacagaaatcaactctggctgatataagtctaaaagcatttttgggggaatatctggaatagctcacaacataaatgaaataatcaggcctcgagagagattaagaatgggacagattcaggattcaagcaatatggaggatttaaattcccagggcagagtctgattggatgatcttgcatcatgtccccaccccttagctaagagcaggacatcttgattgacagccctgttaaagctgcagtcaattgagaaggtatctaaattaggacaatcggggtaggataggctatgctacagtaatcagtaaacctcgacatctcagtggcttcacacaacaaaggtttgtttcttacataaagtccagtgtggatggggtgaaaccctgcaaggcagctctctctcctccacaagctgactcagggatccagggtgtttccgtatcatggctctgtcatctcaacctgtgccctccacagttgctatcaaaagaggagaaaggacaggagggttgcgggggatgtgttcattggccaggcctgcgagtggcttacagcatatctgcttacattctacggggctgaacccagtcacacggctgaatctgactgcacaggagacagaaaatgtaatcttcctgcttcccaggcagaggaaaataaaatgggatttggtgaacatgtatgttgtctctgctctggaaagagtagaaccccaaagaaaaatgggggtgttgatatcaagataaggaagaaggggtgccagactgggcctggagatttaatcttccctctttccacacagatcttgcccacgtgtcctcccccgccagccttccacagccatggcagcctacggccagacgcagtacagtgcggggatccagcaggctaccccctatacagcttacccacctccagcacaagcctatggaatcccttcctacagtgagtagtaaacaagtccttactctcctcctcaggtccccaaatcatggtctttgttctgcactattgtctcagctaaatgtggattaatagacacaaccaagctgattttggattagagataaagggaaaagagtaacactttaaatatggttcaaattctatagcctataatatcaagatcccttttgatggcaagaattggaaattgaacccaagctggtttagggaaaattgggactgaatgatttgcataccgagagatctgtggatacagctgtcatcaggtatgactggatctaggtgctaaagcgtcatcgtgaggtgtaagtctctttccatcttcagatgctcccagcaagttctccctgcatggcagcaaagatggtgcctgtccactcaaggtttgcatccttttatctctgcatgcccagtggaaagagagctcatctttcccagaagttccaacagaatcccatattggccctcattggcccaagttgggccatgtggcaatgcttatagcaaggcaaggagaacagggtgatggagataaggaagctgaagcctatggattatctttgaaggaggggtggttttcttaaaggaaaacagagtggtagtatcagaagaaggagaaatggatgtggtggaggacggggcagaaacaacagacctccagcccttgactgttcacatcttacagctaagaactgaagacttgcgaacctggctcaccatccatgcccacctgcccttgcctctggccttgagtcatgctattccctcgcctcctagctgatatcttaaccaaagcccttttagtagcaagtgacaaaaacccaagctaatcagctggaggaaacaggggaatttattgcctatgtagctggaaaaacctagggcactggcttcaggcaggcctgggtccaggtcctcaaggtataatatcaggactcagcctctgcttccctttctgtgggcctcaggctcaggcaggctctcccactgtggtggcaaagacagccctggcagtttcaggctgcagtgtcccccaaaaagagagcccctcctgtctaggacttcctgcagagtcccaggaatttctctactggactcccacatccatccaagaagataggtgctgtgggtggccatatttggccacatgtccacccgcaggaccaggggtcaggtcagcctcacccaaaacaactgatctgaaggtgaggcaggggtggttcacaaaggagaaggaggcaggaagaaactacagatagccactccacgtgactttacagcccacccaaatccgggctatccagtggaaaggacgtagcgttggtggcagggacctgcctgcctgacttcgctgcccctgacctctccaggcctcagtttcctcaattgtaaaattaatatgctcgtttcatcttcccacctagaggggtcctgcttgagttgagtgcagaggctgactcttacatttctttcctccctcctcttcctccatacctctgccctgtttgtttgttcattcattcattcatttattcattcattcaacattgagtcatgtgtggggcagacagtggtcaacaaagcagagcgggccctgtcttcatggagattactgcctaaaaccgatgatcaggcagcactagactcacagttttggtatcaggggtcagtggctctatgtggacaaaagccctgcagacatttccttttagctttagtttgccacagtcctcacccagcccacgttactcccttgaattatctgccttttccatgaagacacttgagtttgcaaactctggcctagagatagaaaaaaaagtttttttaattttctttttttgagacagcatctcactctgttgtccagccagagtgcagtggcaccatcgcagctcaccgcaagctcaacatcacaggctcaagtgatcctcccacctcagcctcccaaatagctcagactacaggcatacgctactgcgccctgctaattttttgtatttttttgtagagatgaggttttgccatgttggccaagcaggtctcaaattcctggcctcaagtgatctactgccttggcctcccaaggagctgagactacaagcgggagccactgtacctggccccagatttttaaatctgtatgtgtaatttcaaattaggatgcacggcataaaggaagcaaagacttgttttaggttctagggatgggaaaggccttttaaataaggagcgaaattcagctgagaactgagagatagccatgtgcaggcacagacaggagagcatccaggcagaggggcaggccctgggaatggggaggaacttggcaattctgagaagactaatggctggagcacaatgggagatgaggtgaatgaggtgggcggggcctccgaggcccaggaaagatttggggttctgttccacgtgagactggaagccactagagggtttataagcagtgggtaataggatgcaacttaggtgggttttttttaattttattcttatttttattatttttagagacagggtctggctctgtcttccaggctggagtgccatggtgcaatcatagctcactgcaccctccacctcccaggctcaagcaatcctcctccctcaccctcatgagtagctgggactacaggcacgcactacctcccctggctaatttttttttatttttttgtagagacggggggtggggggtctcactttgttgcccaggctggtcttgaacttcttacctcaagcaatcctcctatctctgcttcccaaagtgctacaatgacaggcatgagctaccatgcccagcctaggttttaaagatcacactggctgctgtggtgaggctggctcagaggggatcaggaggagaagcaggaaggcccgttgggagacggatgaagcctggagcaggaaatgttggaggcctggggcgaggccatggcagcggacagacacatgtagacagaatcaagagcaactctagaggcagaattgacaggtcctgtcgaggcatcagtccaggcttagtaatagtcaccatcgttgacttcctgtcactcacattggtttatttccactaattcctttaatccccacctcaaccctacgaggaaggtcatctcattatcctcccttgagcgataaagaaacagagactcagagaggttaaataacttacccaaggtcacccagctggttggtggcagaggtggaattaagcccaggcagcctggctctggaccccgagccctcacccacggggctccgacgcctggctgtgcattctgtaaatcccgggggattacctatgacagaccttggccaacaggtgtgggcatcttttctaacttttttcccctgctgtgctagaaggcttagaatacaatcacacataagttaccccgcttggctgacagccaagaaaaatgaagccatattctttttcacataaaagagaaaactagccctgttcccagacaaaacatggcatcagatggaaatcaatttggtgcaaagttattttactgtctcagttacttttggagcgtctgctcctggatgatacagagtagatgataagagcacatgtcctggaattctgctgcccagattcacatcccacccttgcctgttgcaggctgcaagaccctgagggagcagcctcccctccctaaacctctgttttcacattcatacaatgggagtaatactaagtctacccctctcatgattgctgggaggattaaatgagatcatctacaccaggggttggctatcttcttctgtaaaggcccaggtggtaaatactttctactttgtgatccatatggtctttattacaactactcagctctgccattgtggcgtgaaagtagccagactgaatgtaaacgaatgggtatgtctgtgttccaataaaactttatttacacaaacaggcagtggaccagatttggtccatgaccctgatctagatgaagggcttcctcaccagggcccaccccaagagaaatgctcaacaaatgtcacctgtcccagtagaagccaggctgccacacacacacgcgtgcacgcacacacacatacacacacacagaatgtccatgtcactgaacaataacaggtggatgaaaagccgtttccctttacatctgcctgtgcctgagcaagctgtgtttgctcatcgtctggacaaaccttgttgaatcttgtcaggaaactttttacattgctccttggcaaatagtgctatttactttgtttaaatacctgcaggaaataacacaattgagcaaactagagacaaggacagttagtgtattgagtatttttttctcaatttattatgcaatattaaagacatacataatagagtaatactatgacacctatgaactgaccattcaatttaaaaaataaagggaggtggctttcctttcctctcaaagattcctgtgcccccaagtttcatgtttatcattcccctgcatttttttatgtagaagagatcaacaaactttttctataaagagccacatagtaaatatttttgtcttagcagaccacacagtctctatctcaatcactcaactctgccattgtagcatgaaagcagccatagacaaagcataaacgaatgggctgtctatgtctcaaaaaactttatttacaaaaatgaacaacagatgacatttggcctatgggctggagtttgctgacctttaatgtagagtattttaagcatgttttaaaactttacctacattgcatcttttagtacacattcttttgcaacttgctttttccacccaacattgtgtctgtaaaatgtatccctgttcatacaagtagctgtagttcattcattttcactgctgtataatattccactacttgatggcaccataacttacttacccattctttagacagtcttttagggctttgtttgtttctcattacataggatgctgcaatcagcatctttgtgcatttctcaggggtggaaacctatgagaggaatttctgggtcatggggtatatgcattcttcactatcctggataatggcaaagaattttcattgtctctggctttgtaaaaagccactccagaacttagtggcttaaaataacactgacgtattatttctgtgggctggccagttgggcctgctgctggtctcccacagtccctctcatgctgctgtgctcgcagcaggtgggctggggctgcctagatggcaccagtggggcctctctctcatgtggcccttcctctgggtttcttcaggcatggtgggctcaggttccaggaggctgaagataaaagcttcaaagcctccgggtgctgagtctcaagaactactgggcgtggtggcacacacgtgctcccagctactagagaggctgaggtgggaggatcacttgagcctgggaggtcgaggctgcagtgaactgtgagcatgccactgcactccagcctgggtgacagagtgaaatcctgtctcaaaaaaaaaagtagttacatatttattttaatatgcatttatatctacatatatatatgtgtatgtgtacaaatataaatataatatatataaaatatggaacctgtgatttcttggtcattattgcttaaggcaagcaaatagttttaaaattgagttgattttttttttttttttgagatgtagtcttgctgtgtctcccaggttggagtgcagtggcatgatctcggctcactgcaacctctgcctcccacgttcaagtgattctcctgcttcagcctcctgaatagctgggattacatatgtgcaccaccacacccagctaattttttgtatttttagtagagacagggtttcaccatgtttcccaggctgatcttgaactcctggcctcaaatgatctgcctgcctcagcatcccaaagtgctgggattgcagacatgagccaccatgcctggcctgatgtttaaaaataacatgaaatgaatcattatatggatggtgctggggtatgggaaaaccaagcaagtggtgcacaacattgaagatggggaagcactaatttggtccaaaaccctcattgtagtcacgaggaaactgaggcttggaaagcagagggcacctgcctcagtgataccacagagccaggacaggaaacgagtactctgggctgtgccatgtgccatgggctgatccaaattcacatcacggagcacctgctcagggggctgttgatattttaaacttgaaccatctcctgtctctcctctgctcagatccctccagggcccctctcaggatcaaagccaaaggttttccactgcagtatctttgccctgtccccaccttgatgatctttctgacctcatcactcaccctctccccaacccttaccccactccagcctcactggcctccttgctgttagttcatccaacataccaagtacactcctgcctgatgacctttgcacatgccttccctctgcctggacaggtattccttcgggtgtccacaagtcttgctcctttgcttccttcaggtctttgttcaaatgtctcttcctccctgggacctcttcctcctcctccaagggacctttcaggatcactctgtttgaaatttcaaatcccaactccccttaaccaactttgctacctccttccctgcttcattcttctttttagcaccttaagactctaaatggagtccaaaaaatttaatcatgtttggagaattgtgttagtgtgaggttcataagatagcagggaaaagtgtgtgccgctgagtgtgccagggagtcagggagccaatcatgttgtctcttgtgttacccaaaaagtattttgtatgcttctcctctgctgtgtgtttttacttgtttttctgctgtcattctcctcccactagcatataagctccaaccgctacagtatctgtagcatcaagatctgtatctcctgacctgttgcaggtgctgagctaatagttgtgaatgagtgaatgaatgcttattggctgtctgttgttgacaccctctctgaaatccacatgctcactttggtgcttccatgagtggaagccagtggaacttgcagatagttcacgagcaccttttcggaggcctctttctctttgctgtgaagatacttatcagagatgcctgcggagtagcaggtctgatgagatcagtctgtccccaggccaaaccgtgaccagatttcctttgaacataatctcttagagcagtgtttctctatctggtttaaaagaccagtttttgggtttttgctttttaattgccattccactgtggactaatattttagtaaaaatgaattaccagaaaaatcaaattaaaatttttatttacttatttatttgagatgaagtctcactctttagcccaggctggagtgcattggcatgatcttggctcactgcaacctccaccttctagtttcaagcaattctcatgcctcagcttcctgagtagctgggattagaggtgtgcaccaccacacccagttaatttttgtattttttgtagagacagggtttcgccatgttagccaggctgatctcgaactcctgacctcaagtgatccacccacctcagcctcccaaagtgctgggattacaggcgtgagccaccgtactgggccaaattaaaatgttttaaaaacatactaaatacaagtctggagaaatggccttagatgtcagaacaatgccaagttgctgcaaaagtttcaggatgtttacttctcagtgtctgactttctcattctgaacttgtaactgatgcatggaccacagtctggacaacagacttaggggacgaaggccctcgtgcgcctttgccattttcatattctcttctctttctcatggattagaattttatgatccaaccccttcagcaaacaaaagaagagatgaaaaactttattttcttttctttcatagtcattcatttaccagacaatttttgagcacctactatgtgcaagacagggagccacatatggggagactgcagggtacaagagggaaccagccccgccctcctggagcctccagcctaaacagagagcagaggttcaacagtgaatggggttgagtgccaggcaggagaactgcatgctactcggggctgacttaggtcatagaagacctttctagggaaacaacatttgcctgatagagaagagggaggtgtggattccaggcagaggaagcaacatatgcaaaggctttgagtccaaagacatggttgcagtttgtctgtatcatctatttaaaatggacaatgtaggtacccttagaggcagcaacttttgtcttgtatccaaccaagacaaacactctgacattgcttgaggaagtatgtacatttcatcttggattgtgatagtaaaaactggaatcaacctggagttcatcatcagggaactggctgaacaagcagtgatatttccgattctggctttccatcccgtcactaaaacagagtgtctgagcatatggcttgggcagagggagcgaaggagcccaggaaaggcagtgaggtcggaggggtgggcagagcccatgcagggccttgggggtcactgcagagtttagattttactttaggtgcacagtgaggcagactgtacccaatgcaacgttaacgactcctagtggactgagcaaaaagaaggtgctgtataaatattgcttgttgctgccatcattgttgttactaaagtctggcaccatcgatggcataaaaccccttcacacctgttattgagaagcatcaaggtaaggaaccttgacttcagagttatccgccaattgctagaccccagtccaatggattggcaatctcaattcccacatctttaaaatgaaggaagtaatatatagcctgttttgtgggattgatgtgaggataaaagagatgtgttctttaattacttcattcagagcctttatatgttcattctttcctcttactttaatttcctaacaacccatcatttcacaagaaaggaggcctccaacctggggttgcaggagaaactttccaggtcaccagtcaatgaagcaaaccatctaggactccagcccagatttcctgactcacaatctatctgtttttaccttactaagcattctcttattttacggggttgacaggataagaaggaggaaatttcaatacaaaaaccatcagcagaactagaaatgttcttgaaagaaatgaaattttaaacagcaatgagatactgttctatacccataagatagacagagataagcaatgtttgataacagttgatgtggttgtggagaagcaggactcactcagtgactggagagaatgtcacctacaatctagggagcaccattcagcaacatccaagaagatttaagatgttcttgccctggactcagtgattccagctactgggaatttacctaaaagatagacttgcacatgtgcacaaaatgtgtgtgtgtgtgtgtgtgtgtgtgtgtgtgtgtgtgtgtggtgtgatgactataagctgcagcaaatacatatgtatatgcatataggtacatctatatgttaaatatattttctgcatgtatatatgtgtgtatatatacacatttgttgcatgtgtgtgtgttatgtgtgtatttgctgcagcttaaattacagtcataaaatctcaaaaccacccaaaagttaatgaataggaaactggttaaatgatgaggaaaccacacattagaatgtcacacagccatcaatacagaataaggaagaactttataagctcatgaagaataatcattaccacatattgtgaagcagtaaaagaaaaagaagaaaatgaagaacagaatttatagaatactcctgtttatattttaaaagatggaatagatatatacgttacatatatatattatatacataagtttgcatatgcacagaacctgtctggaagtgaattgtgttccataaagctggtaatcgtggttgcctataggcagaagagctggggtttgaggtcagggataggaagagactctttgctttatgccttttgtactattggaattttctacaatgcattcattacattttcagtaaaaattaagtgaatgagctgatgatggttagcctctcctcctcaacacagtccctttctcagccagttgttcatggaattagtacctatgctttaggtaagcatgccgagttttgctgaagcagaaggcagatttgtaactgtggccttgggattagcaggtccccccgtgagattggagagtgtcttacagttaagtgatatcatctttgcagaggaagggtggttcatttcacacctttgcccaaaatcctaatggacatttaagccatacacagcactactcagtggagtagtgggctgcaggcttgcatacctaccaagctggcaggtagcatgaagctcacggtggcatgtacaaaatatgagaccttcatacctaccaagctggcaggtagcatgaagctggtggcatgtacaaaatatgagaccttcttggcctgcctttcccttccccacttttgatagggtcctaggatgtaccaaaacaaatcacaactgcaatgagaaaatagcacgttaaaaccagcctcaaagtcctgcagatggaatggaatctatcatgacctgggaaacacctgaattgggagcccacaggggcagcttgtggtcacatgggttgcagacatggtgttactagaccatcttgtcattcaaaaagaagccgtaagtccagctttttgtatgaaatatcctgacttttaacaaaatcaactaattcagtttttcttaaaaatatgctggccaagtcaaatgtctataggctcactttggctgacaagccaccagtttgcaactcctcatttggaagctgataaaattgcatgctgtcttgacccagtagctcttttgtgggtgacaaggacgcatcctaatcatgtgtccttggtccttttttttccccctcttccttcaaaggcatcaagacagaagacagcttgaaccattcccctggccagagtggattcctcagctatggctccagcttcagcacctcacccactggacagagcccatacacctaccagatgcacggtcagtgtggcgctgtggccccttcctgcccatctctaaggaccacctaagttgggtgtccattcattcattcattcagcagattttttgagcacctactatgtgccaggctctatctcgaggagtggagaaaatagatacgagatctgcctttcatggtcgttacctggcagtggggagagactaacgataaagtcggcaaataagccagatgatttgggaaggggttgaatgtaataaggcaaataaacctggtctttgcataaagagtgatgagcacttgggaggtcaggaaaggtgagatttgtgactttagatcaaatcaccagggaaggctctttgaagagatgacattgggcagaatcccaaagggtgaggcagagcagccacatagacatcttagggaagagcattccaggcagagggaacagcctgtacaaactgtgcatgcagggaaatgtctggatgtattggaggcacagagctgagaccagtgagactggagcaaagtcagaaggcatgtaggaggagagaatcttggagaaagagcaaggcgcaatcacacatggccttgagggatatgggaaggagtttgcttgtattttaagtgtgatgggacaggcaagtctattgtagagactcagaaatgtcgggtggtggaaatattggacagtcgggtgaagaagctgttattccaggcaggaggatcaaggctctgcagccctagagggtggccttaaggaagaaagaactccattgtgtaaccctccacccacctgccataaggaactggcttactgggttctcccatgctcatctccactcttttaccatccaagaacccttctctgttctggtgcccccttgggagcatgctggagttgatgcatggagcagggggctggtggctgtaattatggggatccccattctgctgtttccctttatataagctgctaaaaattaccatcaagggtctgaaagggtaaaatgataagatggtgggctgatgtgtgattgtacttttttttgagatggagtcttgctatgttgcccagactgggctcaagtgattctgccacctcagcctcctgagtatctaggaccacagctgtgcgctgctgtacccagctttgatagtatttttcttttaaaagcaactacttggaagtactatcacttcatctttattattttaattttttattaaggaagtaataaaaatgattgtcaagggcagcatttcaggaaaaaaaaattgtgaaaggagaataaataatcttaggtatgtgtgtagggaaagcaggtgataagcattcatgcccagccctgagaatagcttcctggtaaggtctgtgtccaagtttgtcagtgatgccatgagccagccttgaccaaacatgctaggtgccaggtgatgctctgtgggttctctcatacaaccttcatgacgctctcaagcaacggtactgtattattcccatttcacagaagaggaaactgaggcatagaaggaatgactgatttgtccaacaccagggcaaggattttagattttattgtaagcataatggcaaagggactgtgtcagatgtcttgggggcctggtggaatcccaacccccagcctcactgcaaagcccatcgctgtaaccccggcactttcctgcctcctctgcttctgctctcacgtctgtgtccccagtcgggcctttctgaggcccactgaagggagtaaactcctgagacccatctctccaagtggggagtgaatgatggcaccggccctgataacaggaggtgtgtgaaggtactgaacttcaacttgtatttgagtccatctcaagccagtttttttccagctctttaaatagaaactggacttactgcctcagggcttctgaggccacagaggttgaaatggagacccggtccccgtatcccattttgacaccccctcagccacacaataagtgatctaagttatgtaggagaggcccccattcattcattcattcattcattccgtatgttgagcaccagcttgacacctggcacccttctaggcactgagggcacagcagcacacaaagacaatctcctcatggagaaagatggacagtaatcaattgacaagtagatagataattatagattttgataaagcctgtgacagacaaaaacatggtggcatgctggaccgtgagcagtggtatggaccaggagtggtgatcggcattcagcaggtggtcaggggcctcccgatggaaaggaggctgccacaggaggggccagagctgggccgggccgtacaggcagcgggaacgcaagagcaaaggccccgcggcaggaaaaggctcacagtgttcaaggactccagaggagcctcatcctatcctccccagagcaggatatgcagaataatattctttcttcttacagcaaccgcgtgaggtgggcaccataagccctgctttcatagatggtgaaagtgaggctcagagagggcaagtgacttgcctgaaaccgcagagccaataagtgttcagagctgggattcagactccagtttctctggtgccacttcctctaaatgatgagatttcctggactccttcaggactccaggaactgtcctaatgtctgcacataaacatgcggcttaatctccccagtagccccgtgacatgagcactgccactgccctcatcttacaggtggagaaactgaggcataaaatgtttcagtcacttacccaaggtcacacggccatggcagtgggaaatgagccaggcagtcgcccaggcacataaccctcacgccatcctgcccttcacactctcttagatccatctagaaggtgattctcaggggtgagcctagggccccaccccccacctcaatccccaccagccaacgtctccagctctcttctcgccctaccatgggaatcgtccaggttattttcttatcctcctcacagcccagatgacagaagggcagcggcagcagctgggcttcgtcccaattaactgccttcagtctgatgctaatggctataaactgctcttgagacagcccaggcattttgcaagcctgacatattcctccttaagtatttttttcaaacacaaacacacagaacgctcacacaccatgcccatgtgcttcctattaactttttttttttctgagttgttccagaggagaaataaactctcgaactactgagagcatttcagaatggaagacattggttgagcttagtttctcagaggaagaagaaaataaagaagattgaggcttatgaacttttaggcctgaaaatgctgattttgtgaaattggcccatggtgagaagctagcatgagtctttttcctttctaagaatttaaaccataattttggcccataatcccagcactttgggagaccaaggcaggtatatttattgcttgagtccaggagttcaagaccagcctgggaaacctggtgaaacccatctctacaaaaaaaaaaaaaattatctgggcatggtgatgcatgcctgtagtcccagctactcaatatgttgaggtaggaggatcacttttcagcctgggaggtcaatgctgcagtaagccgtgatcatgccactgcactccagcctgagcaatagagcaagaccctatctttaaaaaaaaaaaaaaaatgctgggcatggtggtgtgcacctgtagttccagctactcaggaagctgaggtggaaggattgcttgagcccaggagttcaaggttgcagtgagctatgatcaccccactgcactccagcctgggcaatacagcatgaccctgtctcaaaaaaagaaaaaatatataatttttagaagcaaaaaaggatgctcttggggctcacctcatcattttacagatgagtaaactgaggcactgcaacagagtgtcttacggaagatcacagagcaagctttagacaagccaggatgcctcccactaggtcttctagctaatctcataaacttccaaaaactttagcacagccatcaccccgtaaggccctggtttgagatctgtatctgtttggataacactgcccctccatggaatatacaataaatgtaaaagaaaaaagttcacagctcttgttcagcctttgcagagttgtttattttctttattttaagttcaccctggggtttttatagctgaagtgtgtttcttatgggtttgattttttttctttttggcttcttctggtaaaacactgctattcacagaaataaccacaaagattaaaaagagggggaaaaaaatctccagagtgtgttataagaagtttctggtgccacagagttgttaagagttctggacctggcctgtggtcagtcctggcagtaccccacacacaatggcatgagttggggaagcacatggacttctctgtgcctcagtttcctcacctgtgaaactggtatcatagtgagagaggtgacaacatgaggctttgggagactaaataacatgattcatgggcaccacagatgagatccataaaggctagattttctttttattatctctgttattccttccttagcatggtagttaaaaacaactaaaagcagggactctgaagtcaggttgagttaacctccaaatacggctgcaaaccagccctgtgaccttgagctcagttacttctcagtcctccagtttccttccctatgaaatggggacactaagagtactttactcgtggggtgctatgatgactaaatgagttaatgtatgtgaagtgtttagagcgcacctggcacaaactaacgctctctaaacgttaattatcgttattatgattgacattgttagcctcacttcaggtttgatgggccatgttctttccaagttcgcttctatttcctgaactctcaattttagtaagtggtcagggtaagagaaaagaggaatactaatctgagactgtgggactgtctgcatccacataaactccccttccagtgaactctgtgttgtagggagacttaaaaacaggccaagtgcagtggctcatacctataatcccagccctttgggaggctgaggcgggcggatcatctgagctcaggagttcaagaccagcctggccaacatggcaaaaccccatct[131 bp omitted]cactccagtctaggcgacaaagcgagactccatctcaaaaaaaaaaaaaaaaaaggcaagaaaacagtgggatccctatccagtggaaactctttttgcatttatgaagggccagggaacataaagactgaagcttagaacccctccagcagccactcaggagcaacatagaatcgtgcaattcagggatgtgtaggaaattaaaagttcagtaaaagcacttgttactcagtgatctcagctcgagacctccgagactggattgtgttggatttagaaagtctctgtgtcagattcatgaaatctaccaccagtaaactgtgtgaccttggacaagtcacaaagccttcatgatctgtgttccacagttctagtgctaacaagagttccaggaaaaaataaaggggttggggcgggtcatggtcatacataccaaatacgtttagtcaatagtgcatgccacaaagttaaaatagacatctttgctacaggacttttcagagcctttgcaggctgttgtgccttgtacttctccaggaatagaattcaggaggcaattttcccaggcagatgggatgagggcccctccgtccaaactcgttctgtggtcactgagaagccctggatgtcatgatcttttaggacccttcctttatgaacgttctttgaatttctattgttttaaacaatgaacatgtatgtttttctttttcctgtgttttaattaaattgtttcttgttgagatggagtctcactttgtcgtccaggctggagtacaatggcatgatctcggcttactgcaacctccgcctcctggattcaagcaattctctagcctcagtctcccaagtagctgggattacaggcgcctgccaccacacctggctaatttttgtatttttagtagagatggggtttcaccacgttggtcaggctggtctcgaactccttacctcaagtgatccgcccacctcagccccccagagtgctgggattacaggcatgagccactgtgctcagccttaatttttaactgagatataactcacatcctaaacttcaccttttttttttttttttttttgaggcagggtctctgtcacccgggctggagtgcagtggtgcgatgacagctcactgcaacctctgcctcctgggctcaagtgattctcccgcctcagccttccgagtagctgggactagcaggtgcctgccaccatgcccagctaattttgtttattttttgtagagacggggtttcattgtgttgcataggctggtaaacttcacctttttaaagtgttcagtttagtgtttttagtatattcactaaaattgtgcaaccatcaccactatctaatgccacagcatttttgtcaccccgcaaagaaaccccatgtccattagcgtcactccttagttcccctccctccgatatattccttttgtaataaaaaaaaaagacacatgaattttttaaacaggttacacatttacctagttcgggcatctgtggaaatctttcttctaccctcatgctacatccaccccgtttccaaacccctaacaattaaccactgtaataatttcgtgggaacccacccagaacatctttttgcaaacataagtaaaatataagcagtctattatattgtatgttactattacaagaattagttcagacgtgattcataaataagaaaactatgttagtataactcggaagttgcattgtttcatttgcttctaagggtttctctatcactgttgttgttgttacgtgccttgatgtagttttctttatgattctcgtgctctgtgttcattgagactcttagatctgtggatttatcatttccatcaaatttggaaatttttcagccaatatttcttcaaatttttgtctgatgttccacaccactacctcccactccaagttcataaatcttttcttctgtagtatctgatctgctgctaattacatccatgtcatttttcatcccatacatcattttcatctccagaagtttgattttgggtgttttttttttttttttttttttgaagacagagccttgctctgtcacccaggctggagtgcagtggcgtaatctcggctcattgcaacctctgcctccagggttcaagcgattcttatgcctcagccacctgagtagctgggcttacaggtgctcaccaccactcctggctaatttttgtatattaagtggagatggggttttgccatgttggccaggctggtctcaagctcctgagctcaggcagtctgcccacctcagcctcccaaagtgctagtacaggcatgagccaccatgcccagcctgggtctttttctgataacttccatgtctctacttaacatgtccaatctttcttctggcttcttgaacagatagaatccagttgtagtaaacgttttaatgtccgtgtctaattctatcattcctgtcatttctgggttcattttcattgatttttctccatgtcgaaaatcatatttttctgcttccctgcatgcctgataagtttcaattggatgccaaacataaattttaccttgtcagatgctggatatttttatattcctataaatacttttgagctttgttctgggatgcagttaggttacttagaaactgttgaatgcttttgagtcttgctttcagccttgccagttgggatcagagcagtgtttggtccaggagaaatttttcccactactgaggcaaacccttctgagtattctacccaatgccccatgaattgtgaggttctgcaattctggcaggtgggaacaggaactattcccagctccattatgagctctgaagcttgttgcttctgatcttttccagtggttctctctcagccctgggtagtttccttacacccatgtgctcatcagttctcaggtggccactcaaggggaactgtgagcaaacctccagagcgctcccagcacaactttctttttctgggagttctgctctgccaattccagccacattagcctccgctgacttgcagctccatctccccagctcagagagaccacgggcctccacctgggttttcccttcttggaaactctatcctggggcaatcatacagctcaccatctgtttctcctcttgcaaggatcactgtccatgcctaaggcccaatgtcttggaaacctagttttcaaactgtttcagctgggagggtaaatccagaccttgttactcagtcttggccagaagtgaaaattccactgcattggttcatttgtaatttttccagagcatgggctaacagcagctgaatgtaaaataccaaacacaagcaaatgcagcaagcctggtatgagtacagttctgctcagaatgccctatcttcttcctcttcctcagtttggttacatgttctattttgggagaactaattttgcaattcctgccaatttttatgcattttgcccttgtttccataattcagcacctccatcatctcttcatcacctccatcaagatactttcacttccttttaaaagcaaagatctctatttaatgtaatgcttctcagtttattatttacatttttattttttcaccatgctatcatttttactgggattgtcactgctttggttaatgctctggttacaaagtggcattgctgtggggcagtcagctgtaaccctacttcttcccataagctctctgattttagtgcacaggtttgcataactcatggcctttcaagaaagcattatcacatgatggcagaaacacttgtctatattcttttcacagataacatcctatgcacactcttctgcacttcgttttcctcatttagctatataccttggaaagaacttgctaagtcaatatatagaaagagcttcttcattctttttcatagatgcctattattgcattgaatgatgtgctataaatgattgagccagttccttactgggggccatttggcctgtttctactcttttgcaactgcctccgaaatggtcatgaaaacccctatatgtatattattttttataagtatatctgaagggcaaatttccaaaaagtaggagttggggtcaaggggcaagtctatatttaaatttggtagatatcttcaagttaccctccatagggattctacccatttacactccccccagcagtgtctgggagtagtacctgttttcacaaaaactcatcgacccagtgtcatcttacggttgaagtttttgccaatctgatgcgtgaagaaatggtgtctcagggcagtagtaatttctaagtcttgtcccacaagtgaggttgagcatcttttcagacccttgactgatttgtatttcctttcctgtgaaccaggagatttgacttttaaaagtttgcaaaagaaaagcaattaagtactaggcataccaatatttaagcatatcataaagcttcaataatcaaagcaacatgcttctagtgtgaatacactcaccgatcaatagaggagaacaaatggtctcagagagagacccacacatttagtacgtggagaaggtgatgtcttgagtcagtgggaaaatatgaactattgaatgaatggcattggaacagctagttagccatctggagaaaagtatccattcctactaccagaaaacaaatccaaatggattgacggtttaaatgttaaaaataaaaccataaaaatactagaacgagaataagcacaattttttataaccttggagtggaaaaggcttttctaaccaggactcagaaatccaaaatccataaatgaaaagattgacaggttcaactacagaattttttttttcttttttggcacggcaaagaacaccagaagtcaaaacaacaaaacaaatgacaaaaaacaagcaaacaaacaaaaaaaaagaaaacaaaatgacaaactgaaaagaaatatttacatctgaaatcacaaagaaatgttactttttcaaaaatgattctactagtctatggattgaacctgctccaggatgtggttcttctcaatcaggatttcagactcaaatagtacagggccgagcagtaatgtaaaagagagacatgagctagatatagggttatagggagtggtgggaactgtagcaaattagagactaaaccccccaccaacgctggggatagtggggtgttacttggcttcagcccattgctgcccctctagaatggatcccaaggagaccacatctttccatttttcaaagtgatccctaaaactctatttaatgtgaaatctccttattctttttcaatatggacaattgatatacactctctttgaaacaccttgtgaagcatacaaacacgtataaggctggcttcatgcccacatcttgcagtcttgctccatattttaactgaaccacaggtcccgagatgtctagatggggcaaatcacaagctaagtggtgacttggggaaccacacagatcacctcctttgggttcccccacctctggcttatttcatcagtgaggtatgtttcagagaacttgagtgataggtgtggccatagttgagagtggagcccagtggcctcctcatggtgaaatggagtcatttccctatttctctccggtgatggcatctttcaggctgtcccagcccagccagttttgagcagtctaaatcttcctgatctcactgcatcggtcaagacaggagccagtcttggcatcctatgggttgttggactgaggccgagttccctaatgtgaatcagcaactcttctgcacacaatgaagtgggtgaagtttccccatgcatgtcagcattctcgcccctgtgcaacacctccagcctggggggtcactctcccctccccttcatgtgtgctggcaggcttgctgccttttgcttgagctaaagtcttctgaatttagaacgtatagagtttaaatggagggtctttcctctagttacataacaagttagatttggtcacccctatctccaaaagccactggaggtaacaggcggaaacagctggagagattgagaatgagtttgggatcaggagggagtttagttcaacagcaatttgctaaggcagtgctgtccaacagacccttctgtgatgatggaaatcctctgagtggctgtgcaacgtgatagcccctagccacaggtggctactgagcactgaaatgtggttagtgcaactgaggaattgaatttttaattttgtttaattttaattaattgtaaatgcacctactctattgggcagcacaggtctaagcaatgtttcaaagctaactcttaagttgtgttatggactgaattgtttcccgcccctaaaattcatatgttgaagctgttacctccaatgtgatgggttttggtgatgaggcctttgggaggtgttagggttaaatgaggtcatgagggtggggtcttcagaatgggattgctgttcttataaaaagaaagagagagagagatctcgacctccttgtctctccctgaatgcacatactgaggacaggccatgcaaggacacagtgagaaggtgaccatatgcaagccaggaagaagaccttcaccaggaatccaaccagctggcacgttgaccttggacttcttggactccagaactatgagaaataaatgtctgctgtttaagccacctaggtgacagcattctgtgacagcagcctgcactaagacagtaggtttttcctagacatgcaaaagcagaaatggaaaagctaatatcctgagcattttgtttgtttctcttttgaagatgcttcaccttcttctcttcttgcccccactatcagacggattttcaaagcaaagcaggtctacgtgtggcatcaggagctggtgagtgacagaagctggtgccttcatatagccgtcatcccagtagatattaagggagcatctcctctgtgccaggcactgtgccaggtgctgagaaagcagaggtgagcaagacaaatacagtccctgcccccctggagttcacaccagggatgagagatggacaataatccaatgatggcacaacacatgtaaaattgtacctgtaaagctctaggacacagggccaagacagagtctgcaactgtctggctccaagcctgtgctcttcactctgccactggtcacagatccagatgcctcatgagccagcccacaaggtcagtgtgtgaagatggctgggtggccctgtggcaaactaaggagccccagccctatataccggggtagccccaccccattaaagctggttattgcgatgccatagattattcaaaatttaaattaaaaaaaaacaaatgccagaaatcttttataagaaatttcccaattaaaaagacttaaattggtagcaacaaatttttaaaataaaataaaacttactgtgcaagccaaagcacatgtacagattggattcagcccacaggctgccattttgctaactgtgttctctatcatgaccatggagagaactgatgtgaaggcaggggactctgagctcagaaggggaagaaatgggggttagcatattcaggacagggtgtaagaaggcagaagggccacaggttatggatgtgtcctgtctcagccacatcagctggaagaataatgatggcgtggtttctagaattaagagttgaagttgaacaagggctcagcccatagaaggagcttatcgaagacatgctgtggcaactttgcctggccaccctgtagctcgccagttactttgatgggcagccatggcttttatccatattttcagggcagaagacaggtggaaccagaatgatgccataatggttgtaaccagtgggtggccaatttggggttgacataactgtatctgcaggggaagcatgatcaggtccttcttcatatttaaggcttacctactccttttaccccttcctctataagtagcactgctgtctcttacatccttttcctcatacctcccattcattctgtctacaaggttactaacttccttattctctatacttaacacatctttacattttgcccatatcacccaagctccttgcctactcactaagtttttataacacttcttccaagtttcattcaccccatctctttttcttttttctacaacacataattgaacatcgttaaatattcaattaagaattattgaacacagtacagttacaattgaacatattacaatagcattcttacaaagttctatgtatgttaaagccctgaaaaaaaattctgcttgtaaaatggactgatgtgttggaacagaggtgagcaaactttctgtaaaagagccagagagtaaatattttagattttgagggtcataggtctctgtcccaattactcgtaactctgtcattgtagattgaaaacagccatagtcaatacgacaacgaatgggcaaggctgtcttccaagacagtgttatttacaaaagcaggtggtgggttggatttggctgagctctgtgttctagggtcatattattaaaaccagatcttatctgcctgaatgtttggttggatatttgaaagtcaggtgggacctgggaatggtcttccttttgctggactctccacacattgcagaatgtctgcacctctgtcacctgcccactaaatgccactagttcctccaataaaagtgtccccatgaatttccaggcaccccctaggggtactgcagccacccaaccactggtttacacagtggcaggttcaggcatggggagaggtggctgtggtgtaggaatgaacatctgtcattcactcagcaaacattcaccagcgtaggctctgttgcaggcagcatgctaagcatgggccacacagccccaggctgacagtcaagccacaccttcatggaatttatatcccagggaggatacaggcggtgcatgagtctagttaacctgccataacaaaataccatggtcttggtggcctagacaacagaactttattttctcacagctctgggagctagaagtcccagatggaggtgccagcagattctcttccttgtgagggcttgcttgtatatgctcgctctgtgaacacatggcctctcctctttgggttcacagagagagaaatctccggtgtctcctttttttgaaagacagggtcttgctctatagcccagactgtagtgcagtggtgcaatcgtagtcactataacctcgaatgcctggactcaagcgatcctctcgtctcagcctcctgagtagctgagactacaggtgcacaccaggctgctgctgcttataaagacaccagttattaccttgtaactcttatgacctcatttaatcttcattactactctggaggccctgtttccaaatacagtcacaattgggggttacagcttcaacataacgaatctgggggccacaattcagttgcaacacgcagtgggtaaggaaatgagcaaatgacaagatgatgtcaactgtgatgagtgctccaaggagaataaacagggagatgtaacaaagagaaaccaggaaggacgccaggctctctgaggaagtgacagtggagctggcacttgcaaattcggaagagccagccatgggtcacaagtgtcgccagcagataggaggccaagtggctgaggagccaaggggagaggggtggggaatgagttggccggtgctcaggcaccgggaagccatggggttctaaaacagggcaggtgatctggtttgcatctcagaaagaccagttgactgctgggatgagtggactatggggggatggcaagggctgcaaggaggccaggagggagttctgtcctgagacagtgcctgacctgtccctagctctcccttcccctccgcttctctaggtcagacacagtgaagccagtattcacaagtgtacctgtgacaatgcctgccagatctcagtgaccccattcagaaaattctagaattattacaacttatccttttactcccagaggaatgaaggcccagagcacggctttgatgacgttgcttttgtgtcacttgtttcttatttcatttgtttatcatttttatttctgacgtttcgatgaaatgagaactgggcccacaaccagggtctgcacctgcacaatttgttgaaaagtcatagatgaaatctctctgccatctgatcattggcaggggcaggggtgggggaaggggagtggaatgagaaaaaggaaaaaaaatgcaccaaattttaaaaaccagtacaaacacacaaaaaatgcagagtcctatccaaggaacaagtccctgccctgctaattccttagagataaaaggagagcagcctgctcccagcccaggcagcccagccttctgttcaggaattgaaaggggtaattaaggggtaggggaaatacagcctcaggcagggagccatttattagagaggcacagacagacacacagaccctgcaactcctcagttcagagaggaggcacagccaggacagaagccaggctgtgggatgctcagtatgtacccttaaagcaaaccagatttttgctgctcctaaaagttcaggtggtaaagcggggaccagagtccagattccacccacctttgagttatgtgcttctttccctgggcccggggaacatgcagggaattcctgatttttgtattatttcccattcagtagctttacacatgtcccaggaaggcagcttagccccctagtcctgaatccacctgccttcttacactgctttttatttttcatacatttattttaaaccacatcagtgctattagtgtgtatctttccagaacattctctatgtatgcatttacgagcttatttttcttctcaccagtagaaaatcctgtttttttaaacacaagtaatatcttggtgtgcatcttgttttataagttgtcttttatatttttcgccaattaacatgtctcggagatctctcaaagtcggttcaaacaaacccactttagtctcttgtttggcctctgcagacgctgcagtactgcatcgagaaagccagatgctggggttgaatctccgcctctgcactcactggctgtgagacttgattttctcatctgtgaaatggggtttataggagtagcttttgtgaagcctgggacaaagtcaagtgcttccttgctttggctatcatggttagtgttatggatataccacggcatttagccattccccttgaaatggacaaaacttcccacatttcactgttttcacagagaagcctgcaatcttgaattttggttgctgcagccatttgctgtccccgtatgtgtctccctttgtggcaaccagggcccccttccaattcccgcagcaggcctcgccaggtctcgccacactttgcatctctgctactccagccctaaactgcagcctgtaagaactggcagctcaaaaagattgtgcaacccccaagaccatagctcagggccatcccagctgctgctgcaggtgagccctagccggctgcctgacctttaggtcagtggagtatttttgatcgcttaggagcaagagaagagagccaagaggaggcaaataccgaagcctactagagacaacccaggatcccagaagtgtatttctagaaggggtgatagagatcatctaggtcaggggtcagtccaaataggaaaaacttcaggctttgcaggctatacagtctctgttgcaactgctcaactctgccaatgcactgtgaacattgttatagatgacacataaacaaatggcatggctgtgttccaataaaactttatttacaaaaacaggtgaccagcccacagaccatagtttgccaactcctgatatgagttggtctaagtcaatccatcccggggcctgggtgagttgctatggctgcctttagtgctgttcctgacactgaatcatacacaatgacccagagtggcaggactgtatttcttgcccttcttgcaggcaaggtgtcggggagaggcagtcagctaattctagccactgaactgagagtggaaatgatcatgtcatgcctaggccagagcattcaatggccaatacaagactctgccagtgttcaaattgaaggctgctcctttaactggtgcccttgagtgactccagtgaacatagtccctgatgattctcaatggacatatagcatgaaagatagatcaactttgattgcattcaagccagtgggatattggggatgtttgttaccacatcataccataacctctcctgactaatttattggcacaagagattattttacatggaacatgaaagtggcactcaaagtcattgggtcacatagtgaggaagtcattcccctttctgtcatctttcagcccttctgattcagtgataaagggaggaaggaagtctctatttgatgctgatatatcttcaatgtgtctctaatccctgcaaatacttctttttaacaagatgagagcaaaccctaggtttaaggtctttggcagacaacagtatttggctagaattaaaaacatttgttccctatgtattttttgtgttttgtatttatcattaatggcaagtggtattgattttctatttacagtaataatataaagtcttctcagacaaatttatttaagtaaaaacagtgaatgattatacggatagggcttaggacacaggtaagtttcgcaaaaatgtgagtcaacattaagctgatataagggaaatattaaataaaagaataggccaggtagtttgaggatatttaaaaactgtgtgggggcagggagatgagtagagtctggatgcaggaatcttgttcaatatcttccttgcataagtgtgcaagtggaggcttagagaggggatgtgctttgctgtgggtgaaccagcttcccaggaccaaggcgaggagggatccccaactttgcaattcagaggccaggctatccttgtgcccgaggccctgtccccaccaaagttaaaaggaaaactgaggaatgccagtaagtcaacagaattgcctggatgtgtttcctaagactgtcataacaaagcaccacaatctgggtcactttgaagaatataagtttattgtctcacagttctggaggatagaagtctgaaatcaaggcattggcaaggttggtaccttctggaagctcagagggagactgtcccatgcctctctcctggcttctggtggtggcaggcattccttggcaatccttggcctatagatgcttcacaccaatctctgcccccatcaccacatggcattctctctgtgtgtctgggtccaaatttccttcttcttatgaagacaccctaatccattatgacctcatcttaatttgattacatctgcaaaagacactgtttccaaataagatcacatttacagctactgggccttaggagatgaacatagcctttcaagggacgcaactctacccacgacatcacccaaccagggtccctggctgagctgcaagaggcttggagccaagaactgcgtcctgtccctgagctggctgggcttagcaaaaattgaaaccaccctagtgaaagaggtcggtcaaggatcctgctgctcagctggcttgtattagtctcagtctgagacggtggcggcaaagatggtctaggccccagcaagtgaggcagcaagaggccaatgccagcaaaggtcagggctccctctttaagtataaatagaaccttcttcccagccaccccctcccatagccacacaatatctctttcaaagatctcaaaacactgaagcagaccgtaccaaattgactttattgttttaaaaccagccccttctgtctgccaccacccgccaccccttcccgaaggggaagaaaaaaatcataatagatgtctctccagcgtgcacctctgttctcctctctctaatggcagcttgggaccctgaggcagtgacgcttagtaatgtatcctaatagtcagtgtttgtctgacaaatacctagtgaccacaagcctaatcagggccgccatgaattaatggtcagtgtagtgatgggtgctgaatgatcataaaaatagctaatactgggccgggcttggtggctgatacctgtaactttgggaaacggaggcaggaggactccttgagactagaagttcgagaccagcctgagcaacatggcaaaaccccgtctctgaaaaaaaaaaagaaaaagggggccatgtgtggtggcgtgcacctgtggtcttagctacttgggaggctgaggtgggagaatcacttgagcctgggcagtcgaggctgcagtgagctgtgattgtgccactgcactccagcctgggtgacagagtaagaccctatttcaaaagaaagaaaaaacaatgctcacgctgaatgagggcttctggggaccacggaccaggctgagcacttggccagtattcactcccttggtcaccacttcagtgtttgcagcaagttgttgccatttgacagatgagaaaactgagactccaagggaggaagcgagaaagctgggaggtggcgtaaccgggatcagggccgggactagcatgaagtaagagaggcactggctccatgtgcaaaatgtaacagagtgccaggaaattcaatcatggataactattttaaggcactatttaaaatagccaaagttcgcgcaaaaactccctgatgaacaaagtatcaaattttgaaataaagacagactcctgctgtttgtttagtgacccagcaatattgtggaacaggaatggtcgtttccaatcagcccagggttctggtgcacacgggcattatggtcctgccgtggcagggctaggagggtaagcagacagatttggcaatacagggactgttataaagtcatgcttcttgataatagtgtttttaacttcttccacttgcttcgtaatattggaggatattttgggaaatgcatataagagcatgtatttttccttttgcctcaggcttcagtacagcttggttcagtgccaatcaggacacttctccaggcagccggaatccaaagttcttgctttatttatttccttccttccagtaggttctacagttttgcacacaccacctatgtcacctgcataaccaagtacaggggttcagaatgtggccactgaactcagatcgcctaaattcaaatcccagttctgccagttatcaactatgtgacaggcaaggggctttgtttttctggacctctgtttccacattggtaagatacaaatgatgggtgtattagtttgttttcacactgctataaataactgaccgagactgggtaatgtataaaggaaagagtttttattgactcatagtttaacatggctggggaggcttcaggaaacttacaatgatggtggaaggtaaaggggaagcaaagcaccttcttcataaggtggcaggaaggagaagtgccaagagaagcaaggaggagccctttataaaaccatcagatctcatgagaactcgctcactatcatgagaacagtatgggggaaaccacccccatggctcaattacctcctccaagtctctcccttgacacctggggattatggggattgaggattataattcaagatgagatttgggtggggacacaaagcctaaccatatcagtgggaattcccctactcatcagcaggttgttgtagtgattaaatgagtcaaaactcatgcaacactgagaatagacatggcgcaaaagaagcactccgtgttcattggcattattacgtgttgcattgttatgtgttgcattgtattattagttttccatgacttctataacaaattaccacaaacttcgtggcttaaaacaacatgaatttgttatcttaccattttggatgtcagaagtcttactgggctaaaatcaaggcatcagcagagcttctggagcctctaggggagcatctgttcccttgccttttccaacctcccaaggctgccactagtccttggcttgtagacccttcctcaagccagctacagtgggttgatcttctgtagtcccatctctctgactctttctgctgcctttctctgccacttttgaggaccctggtgattaaattaggccctctcaggtaatccaggatcacctcccgatcttaagctcagctgcttagcaaccttaattccatctgaaaccctaatttccctttgccacacatgtaacctaaatatccacaagtcctgggattcgtattggatatcttggtgggtaggggcatttgttctctctaccacacgtgttcatcattcaacaagtatttattcacagcatctgctgtgcagcagaattaggatttacagcagtgacaaaacagataaaaactgcccttgcagggtttacattctaacagggagaggtagatgtatatatatttttaattttaagtaaaattcatagtgtttctgatggtgatggattcatgtagaaaaaataatagagcaagggagagaattaggaagctgatgattttaggtaggggtggggcggtcagggaaaaaagtcaactactggctgggctcagtggctcatacctgtaatcccagcactttgggagaccaagctgggaggatcacttgaacccaggagttcgagaccagcctgggcaacatggcaagaccccgtctctacaaaaattagccaggcatggtggcatgtacctatagtcccagctactcaggaggctaaggtgggaggattgcttgagcccaggagattgaggctgcaatgaactgtaatcgcaccatggcactccagcctgggtgatagagtgagaccttgtctcaaataaataaaaatataaatataaactactgcttctgcccacaagggtgctctggggacaggtccacatagggcagaggaaaccctgaggggtctgtgtgtgtgtgtgcacgcacacatacacaatgttcattgtgatataaaatttaccatcttaaccatttttaattatacagtaaggagtgtgaactgtatgcaccactttgtgcaacagatttctggaacttttccatcttgccaaactgaaactatatccattgaacaactagtccccgttccccgcacgtagcccctggcagccaccgaggacttcctgtttctaagagtgtgagtactttagatacctcacgtaagtggaatcgtacagtatttgtctcctgaggggcttttgtgaagagagtaggggcttctcgaacaggagaaaaacaaacaaaaaaacattgatctttttcacagctactgggccttaggagatgaacttagccttttaggggatgcaactctacccacgacatcacccagcctgggtccctggctgagccgcaagaggcttggggccaagaactgtgtcctgtccctgaaatggctgggcttagcaaaaaaccagagcagatgtcgaaatcacacacacacacacacacacgcgcgcacaattctataatgtgagtttctaactattttgacctagaccaggtgtaggctaactaaaaccctcaggccaaatctgcctgctgtctgtttttgtaccacccatgagcttaaaatgggttttacattttcagatggttgaggaaaagaatcaaaagaagaataatatttcatggcacatgaaaatgatatgaaattcaaatttcagtgtctactaataaagttttattggcacacggccacatccattcattatgtctattgtctgtggctactttcctatcacaaaggcagaactgggtcattgcaaccagagaccatgtggccaaagtagaaaatatttaccgtctgtccctttacagaaaatgttttcccgtcccctgatctagacccacagaaagaaatgcgttttatattttaaccctgagctggcacttgggcatgcatatacctacaatggaaacaaagtatcaacaaaatcacaccctcactgcctgagatcagtgcagtattctcaattctcttttttctattcctgaggcggggcatcttgtagtgataaaagacacagattgtggagccagcctgcctgggttcaaatcctggttttgctgttaactgtgtgactgtgggatattttttcgtttctctgtttcccagcttcttcatctcatagggtcattgtgaagatcaaatactttttttttttttttttttttttgagatggagtcttgctccgtcacccaggctggagtgcaatggtgcgatctcagctcactgcaacctccgcctcccaggttcaagcggttctcctgcctcagcctcccgagtagctgggattacaggcgcccgccaccacacccagctaatttttgtgtttttagtagagacggggtttcaccatgttggccaggctggtctcgaactcctgacctcaggtgacccacccacctcggccacccaaagtgctgggattacaggcatgagccaccgcacctggcaaagatcaaatacttaatagaggcaatgtttagccatgcttggtgagactgcacccagtaagtgtttgccattttaagcacagaaggccatcttttctacagtattggttctatctgctaaattcatttcatacacactagcaggtcttacccagtttgcaaatactgttccataaagaagtgggaacggtcttggcagtctttgaagaatggtatgttccacttagagcctgtctccgtatctccctcaatgggggatcttgggcaagctccttccacagtctgagcctcagttttctggtctgtcgaaggggaattgctgtacctctcctgtaaagccaaactgaggactagtgagaaaacgccgagttggggctcagcacggggccagccctcagggacattcagcactgttttcattatttcctgttctgttacacgctctgctgttacacaaggaaaataacaaccatacagcagcaactgttctaatcacatcacacgcatagctcctttaatcacagccacacaacaggtagggactgaaacacagagacatcaagcaagttgcttgaggtcacacaggtaagaagcttgggtctcagctcagcctttctggctgaaagtcaatgctgttatcactgtaactacactagaacttgtcttgaactgtccctagaaatgggagtgtctgggggttaggggggaggttaaaaaaccaaaacctgtaaaccactgtgacttagggcttatgtagccagcatcttatcactggacagcacatgttctgagggcatgccaagggtttcacagaacacgtgaggctccactgtgtgctcacagctgcagggggccagaagcaccctgtggggtcccagcaggtaaggagcttaggcctggctggaggataaaccaccctccacagggaagttagataaccagcaggtgggtgcagcccccaggtccctgctcctcctgccagcccgctgaagcagtcccgcccctgcgagttagaattctacagaaaaatctgatttctgttctctagtgtttaaagaaccctctgatcctaaggaaatctaaaaactttggcaactggcaactccaacctgccagaaaagcctccctccccatgctctttcctttaatttatcttatgttattttgaatagtgaatacctgcacatagtacagaggtagcagttaagtctgcctcccacttttaacccatagccatccagatctcttccccagaagcagcccccatcaccagtttcttctgtgtccttcaagagatagtctgtgcacgactaagcatacatgtatattgaacacttttatacagatggtaaaaacctaaccctaaacctaccaggactcataagcttgtagcaactgccaacggtctgttctggtctgctctttttatcactgagttgcagtgccaggttctgaattctgtctgagagaactggaccaatcaaggaagccactggcaaatttcattcaatgaacatcttgttggactcggtaggaaggtgtgcagggatcaattagtgatgcctgccatgaccacgggaggggagttttaggataggtgctcagattgttctccctcagtctagtaaatgtttcctgtactttgaatatattatacatggctttgtcacatcaaaattccacctccactattatttgattttttttttaatttacagacttcttttggttcaaaagtaaattcattttaaaagccaaatttatagcactaccttaaatggaaagccagttttgtttgccataaatggaaggtttggtaagaataaattcactaaaaataaaattataaaataaatataaaataaaattggtaagaatatattcactaaaagttaaattatagccaagtatccaaatctgaagacacaaagagattagcgagtgtgaaagatgttctccttaacccaggaataattaatactaatgtaatactcagttccaggtgctccctcattaattgcttacaactaccatataaagtagaaattattatcacgtctattttatagaggaggaaactgaggcatggcaagggtcagtgataggtgcaatgtcactcagctaatgagtggtaaagccaggagttggacccaagccgtctaactccagactccaagctcttcacttctgagctaggctgcctattagatcgattaaaagaaattaaaagggaagtcatctaaaattatcttttgtatcatcactggtggtttctgtcacactttggcagccctagattggtagaaagagccaaactggacttaaggcttaagtctgggttctaaccctgtctttgttacaaattcatatatgaccctggtcattcagcctctgaccctccacttccccatctgtgaagtacaggagttaggctgtatttgagcttccagatggcgggaaccatcccttatctcaaagaacccacagcacctggcacgcattatcagttagagttcattcagccaccagcaacagagaaccgagtgtcccagcttccctctgtcggtctaccctgctatacttggacttagctttttcatccttatgcctcttatcacctcatggtcacaagacagctgcttcacctccagccgtcacctccacattacaggaaggcagaagagaaaagcaagaaggagcaatgccacaatcaggaaagccgaagttttcaggttttgctttaatggctggatttgtgttatatggccactcttggctgcaagggagatagagaagtgatcatttttacctgggtacattgccgctccagttggattttcttaacaagaaaggagaggaagcagatattgagtaggcacccattaggcgactgtaaatacttaaagaaggaaaggcgagagggaggaaggggaggattaatccttcagaccccttccagctctatagagctgtgataaaagaatgttcatcctgctgtcttacagagctctgggcccaaaagtatgaatgttatatttttccttaaaagggtttttctgtgaacttctgcatgttgaggccacttttgtttttattggcaaacttattccaggggaatgagagttcatcacagtacagatgtatatttaagtaggacaggaggcacaggcaggggacccacggaaagggaatgttttaaaagggagaggccaacattcaggctgggaagagtacacaggagtctcaggaaggaggtgtcaggtgccttccaacacagccaaggactggaagtagccctgaagccagtcctgcttctccctggctgcccgtggtcatgggtgcaggccgcattcttttgtgaggcctctcagcatcctttctgcagtgctgtcttcagaaggtggtgtttatcctttcatttatgacctggcctaactttgcactttttcctgtcactttctagctgggtagccttggacaagtttcttaacctctctgttccacagtatctttgtctataaaatgggctgatgataatacgcatttcatagaactgttgtgaggattaaataagttaatacgtataaagctcacagaaactttcctgacacataataagttctcaatcttaccacaccatcatcattattgccattatcatcattgtcctgtctgagtgggtcaatagaagctgacaccttcccaatcaatgttgagcagtttttgagtagttctttcacttttttagtgatcaagaggatattgataggatatagatattgatagttcaacattacgaggtgtttggatccaaacaaagttgtccaggttgtccagtaatagactatccttttaaccacagacttaaatctgtgtttttggagacagggcactaggaaagtgttcatagggcatgctggtatggacaaagttggatactgttaatcagcacagcccttcccactggagctctgcttttgattttacacaactccagggggcaccattcacatcaaagtcatcatagactcagtcatcagaccattttcaacatatggcgttaaggtgtcttgagaaagtgagaggcctttttctagcggggctgctttccatatgctctggtccacccttccaagaaccacagatagcccatgaacccttcttagacttactcattcattcagcatatgttgggtgacacccactgtgtgccaggcattgttccaggcactagagatgcatctgtggacaaagtagacaacagtcaatactcacagtgagaaagacagacaaaaatcaatatttgtaatagaataaataagtacattgtattgtagggtgagaaacgctatgaatgaggaacaaagtagagtctttcgggggggtgggggcaatagcaagttgcactgttcaaccaggtggtcaggctgggtctcactaagaagttggcgttgagcacatggttcattcagcgatcacatttttgtagaacgctgttcattttttaattccttcactcagcaaacatttattgagggcatgccaagtgcttaactaacattctctcatttcatctcacaaaaatcctatctataattactgatatttctcccattttgtaaatgagaaatttgagtcacagggaggcagagtgacttgctcaaggtcatacaatcggagaacagcagaacctagttctaaatccaggactgagacactgccaaggaagcataaatacactgcttctcactgtactcatctagagagagaaaacaatactaaacagatcatcatgtacctaattacatcattgcaattgtggtaattgctatgaaggaagagtacaaggggctttgaggaactgtaactgggcctggggaaatactaagcccagtgtatggactggtgattgctgtgtaacaaaacaccccaaaatgcagtggcttaaaacagcaataatggatcatttctcgtaatgtcttggattggctgggctcagctaggtggttttccactcttcctggtgatacttggggccacacataacagctgcattcagctgagatgcccaagaaagctatccccattcatctggcagctggtgctactataggctggggcaccttggttctcttccacatggactctcttcctccagatatccaaccagcttcctcatagcatagtactgggttctaaggaaaagaaggtggaaactgccagctattttaaggcccggactcagaagtcccagaacatcatttctgccacatgctgttggtcagagcaagtcacaaggccagcccatattcaaggagaggggaagatgtgggaacagtatacacatacagggatcagaagagttcttgacagccatatttgaaggtcagcctaccacatcctgtccttaaaatgtctcacaagtttctagagtaactggagcacagtgcttccatggatttgttaccttgaagacgttctgcctgaagctgcccctgtcttcttcctcaactcttttcatatccgtctacatgagcaatggaattgctatggaaccaagagaacttttgtcaggaatttgcaggggcctgtttttgagaatttttttcagcatcaatggtatatgcgggtttgggagtagtgttagggtatatttccagcttctataacaaagatcaaaactaacaatggtttgatgaagtagcggtttatttctctcttatgtaacagttgggtgttacagaggaggagacccagactcttctcatcttgctgttccacaagtctgtgttgctgtcctcttctatacgacagctaacatcttaaggctaacgtctaagtccatttgggctgctataacaaacagaatatcatagactgggtagcttataaacaacagacatttacttctaacagttctagggactgggaagtccaagatcagggtgccagcatggtcaggttcaggtggggactctcttcctggttcatagaccactaactatctttttgttgtgtccttacatggcagaaagaagagagctttctggggcttcttttataaggggcttcttttataatcaccttcatgagggctcgactttcatgaccaaatcacctcccaaaggtctcacctccaaatactttcatgttaggaattagctttcaacatgtgaattttggagggacacagctaaaacttgtgagcttgatcactgtgagacagaaggaaagaatggacattgtgggcagttaccagcctctaccactcatggctagtgggggaaccagcatgtagatacaccgaaggatgaaggtgtctgcatctctcatcatctctgcacagagcagtgtcagctgtgggctgcccaccagaattcccagccctcatcctaaaacaacagccctcccttggtacaaacatccagtgagtgagctttgatgggaggcttgtgtaggggggtgggctgggtccaagccctcctagccaagcgtgtatggatttcatgctaatctgcctttctggactagtccattcatctattcaaaatgtgtcgccaggtggctgcgaccacgaagggtccaaactagggccagttctggaccaggtttgacactgtaaaatatgactgttaaggtgagttcaagagttcagcagcttggtgaactcttgtgtatctatctgggaagggttctgacagatctcagctgcctcatggaacaagcacaactcttactgcagacagcttaccacttagctgggcaaccttagacatgttacttaacttctttaagcttcaatgtccttatttttaagattgtcaggctggggtatgatatctgtctcccctgggttattgtgaagacaaaaataagatcagattagggcaacttgctcattttctaaaatgtatcgtgtacatttctcaaagaatgattttttttctcttttcaaagtttaaatgttgtagtgcatccccatgaatatccacttacgctgtaggatcctgaaggtcgggggctgtgtcttattcccctctgcatccctcagtgagtaattctgggcctgggagtgagcagttccccattaaacgtgggcatgcatgaatgagtgcgtggatgatctgagactcctaggcgaggggcagcaaacacaaatgcccacaggagtagggcaggtcacgcagaggagtaaagtgggctaagcctaagaaaaaagatgagcaggcactgctttattttttgtctctctctctcttttttttgagacaaagtctcactccgtcacccgggttggagtgcagtggcgcgatctcagctcactgcaacctccgcctcccgggttcaagcgattctcccacctcagcctcccaagtagccagaattacaggcatgtgccaccacgcctggctaatttttgtatttttagtagagacggggtttcaccatgttggccaggctggtcttgaacacctgacctcagataatccacctgcctcagcctcccaaagtgctgggatttcaggtgtgagccaccgcgcccagcctgtctctcatttttgttagggacaaggatattgtcttgtgtcccactggtgctgtaacaaagtgccacacagttaatagcttaaaacaaaacaaatttatgaccttatcgttctggaaattagaattccgaaatcaaggtgttggcagggctgcttccttctgcaggctccatgggaggattcattttccctgctgcccgcattccttggcttgtagcctctttctccatccatctcgctcccagcctcccaaagtgctaggattacaggcatgagccaccgcgcccctgcctccctcttagtaagacaattgtgattatattgggctcactgataatccaggatcatctgcccatctcaaggccattaacataatcacatctgaaaagtcccttttgctgtataaactaactcgacttattcacaaattccgaggattaggacatgaacacgtttgaagaaccattattccgcctaccacagatacacagaaacatttttaactgtaagaaagctatcaggccaaggatgatggcatttttccccagtattaaggagacctcagggaggggaggagagtgtggccacgtggagaacacatgctccatctaaaaggggctgctactcacttttagagtatggttattacatatgagaaactgggcctgatttgccagaacttcccccacttttttgttcaaagggaagcccaaaatctgggttttcatgggaaattattacattttgtcagtttcaaaaatattatgcaggccgggtgcagtggcccatacctgtaattctagcagtttgggagaccaaggcaggtggatcacaaggtcaggagtttgagaccagcgtggctaacatggtgaaaccctgtctctactaaaaatacaaaaattagctgggcgtggtggcatgcaccttttaatcacagctactcgggaggctgaggcaggagaattgcttgaacctgggaggcagaggttgcagtgagccaagatcacgccattgcatgccagtctgggcgacaagagtgaaactctgtctcaagaaaataaataataaaatactgtgcagcagttccctggcagatattatgaaatgtgccaggctgggaggctcaagactctataaattgctgaatctgtgtcccctgcttcactcccagcaagagagaagtaacagaggtgagagtaagaagaagaatgatactagtagtgggtgacatttgttccagcatttctgagttccaacacgttatggtactcaacacattaaatgtattaattcatgtggttctcacaatggccctggaagatgggtgctatttgaagacccattttgcagatggagaaactgaggcacagaggcactaagtcacttgcacagggtcacatagccagtaaatagcagattcaaactcagtcagtccctattctgtttctttttaactttctattttaaattaagtttagacttacagaaaagttgcaaagatagtacagagttccctgaagcccttctcccgctttccctaatgtgaacctcttacataaccatcgggcagtgatcagaactagaaaaatgacataggtgcagtgcttttaactaaactacagactttatttggattttaccagtttttccagaaacatccattttctgttgcaggatccagtcaagggtccctgatatggtttgggtgtgtgtcctctccacattgttggaggtggggcctggtgggaggtgtttggatcatgggggcgaatcccttgtgaatggcttggggctctcctcgtgataatgaatgagttctctctgttaattcacctgcagatctggttgtttcaaagagtctgggacctccccctttccctctctcttgctctgtctcgtcgtgtgacaccccctgctccatgttgtcatgtgacacacctgttccagcttcgccttccgccatgagtaaaagctccctgaggcccccccagaagctgagcagatgctggcaccatgcttgtacagcctgcaggaccatgagccaattcaacctctttgctttaaaaattacccagcttcaggtgtttctttatagcatgcaaaatctgatgacaaacacagtcccactttgcatgtagctgtgcctctctctctaggctcccatctgtgacagaccccccccccaccgccaccagtctgtctttctctcatgattttgacacttttgatgaatactagctggacattttggcagttgtccctcaatatgggcgtgtctcctgtttcctggtgattagcttgaggttgtgcacttttgtcaaggagatcacataagtgacgttgcaccctcagtgcatctttccaggggctgcacgatgctgatgtcttattattggtgatgttaaccttgatcatcatgctcgagtgcctcgtaagatcacaaatcctgtatctgtctgtcccaatggggcaaggagtctcgtagaaatctgcatggttctcaggtatgcctgccggagagcttggctttctctcttgttaactttgatcatcagagtctgggtcctaaccccttggtttaaatgctttctgtatgtagcgagagggaaaaatataaaacaaacacaaaatattcagcaggacacatcagcagacctcacccatcccttgggctgacctagtaaatacgtatgaagtgctcagtaacagtgaataacctccaaattttaagaaggcttaaaaacacccactagtgatggcaggagtgggaaagaaaagcacccacattcggggactttggaaataattcaagcaatgaagattggaagagatgatcagggaaggggaaataaatccagcagagatgaaagccaaggtccgcagctgctcggaccatcaaacctttataagcaatgtgaggtttttaaggaaaggagtgaattatagctgttaggaccaaggacaaaaaggctttgatctaaaagtgggagacatcttaaaggaagctgtggcttttgcataaggtatttccacatcctcctggggtgcattagatgaacccatttggaatttacaggtctgcagaagggcccttattcctaagggtatacacttgaaacaagcggctttgcaggagtggagttgatatttggagagagaaagcgtagcgctccagcaggcatacctgagaaccttgcagcgttttacgaggctccttgccccgctgggacagacagatacaggatgtgtgatcttacgaggcattcgagcattgccatgggaggtcattttggtgagcccttgacctctccatttgaaaagtatcagtttggaaaaggttgtctttactgccaggaaactttagaacagaggctataacatggctttttggacagtcactctgtcgctaaccagatgttggcctctgtttgccctggggcgagaccctagcctatgccggactttccctctcgttgagcactggctgccaaggactcatcacagcacgttctgcatcgcttcgccattgcagtgtatgcacggtgcacgtggctggcatcgcagaacgccatcaaaacagccccataggcggccatctgctgtgaagaaatcagaagtatgtgcaccacatacatctaggtgcattgggaggaagaagtaggggggcggatttttagctgggttaagtcaaatacccaccgaaactatgaatgaaccttccagtaggaccaaaaattacagcagattggaaatgggagaaaactgagatgaagaacaagcccccgaggcagacactcctgggttctaatcccagttttgctcataatctgtgagttttaatttgcaagttgcttaacctcaaggatgaaagcttcagtttctcacctcctgcaagtctgtcctcagatgtggagccttctctgatgacccaacccggaccccagtgttcctgggtccccttccagcttagctggctccagcacctatgaccatgggacacattattttatatatttatgcaccctcagcccctcctgactcatgtcagctccacagaggcagggatttcatcagtatcctgcttaggacagactggcacacagtaggtgctcaggaaacatcagtgaaacgattgaaaggagtcaccgaccttgctctgttgttttcctttttggcagaggataagctaggataaccacagctcggggctcagcatagtgcccggcacagagcagatgcccagcaatcagtaactattgctaatgtcaactcattcacttttttcattcaatgaatagttatcaaacgtttgttgtgtgccaggttccagctggaaatagtgccgagaacaaaacagatactcctttttttccccccagaaattatttcttgagagcctaccacgtgcctcccactctcccatgaacaaaagacagcctctgctcccatggggctcatattccagtgggaatgtgataaacaataaaagcaaccctgaagaaatgagatgatttcagaggcgtgctactaaaagaaaaagctttagaaccagggtcatgtgcaaggtgtggctggagttggggggagcatgggggctgctttagctggagtggtcaggggaggtcacatgtgagctgagacccaaatgaggaggaggaggagaagccagcatgggaggggctggggcccccacctgtggtcctggcagcatcagcatcacgaggggcgtgttagaaatctcaggcctcatccagaaccttcagagtctgtgaacggattgctcagctactgctgggcatttaccccaagccgacctttgttactaaggaatgtttggggcttgagagtgccagtcctctgctgagatttgcagtgcccttttgtaaaccgctacaaggcaaaataggtcgttttaggagtcctgcttctttctttttatcttttttctttttttgagacagggtctcattctgttgcccaaactggagtgcagtggtgtgatcacagctcactgcagccttgacctctgggttcaagcaatcctcctgcctcagcccccaagtagctgggactgtcaccatacacgtgtcaccatacccggttattattctgtattttgtagagatgggatctcactatgttgcccaggctgatctcaaactcctggcctcaagcaatcctcctgtctcagcctcccaaacgggcttctatttcttttatccacattcacagtataagactgagacatgaaatatttccagccaccatctgggtaggacctggtgtcattgagtgtgtcccctatgtggtcctggaagtcaaggactgtgtctgggtcatcttcgtctccccagcccttaacctattgcctgtggagggcatagaattggccaccctccatggtgggccttacgtagtttctcgacctttttttcattattgtcccccacccccactcccacctcaaggatcctttttagacattttttcttctagatgaaattacaaagaataagggagaatggaaattggaggccacccagatctctctctctccacccttagagcccttattggttttgcaagtttctcagcaagaaagacttctttatgaaaagcgaatgccacggacatgctgtacatctgtttatgtgctgaaggtgtatctctacttcattcataaaaagagtaacattcggccgggtgcagcggctcatgcctgtaatcccagcactttgggaaaccaagatgagcagattgcttgaacccaggagttctcgaccagcctgggcaacatgacaaaactccgtctctactagaaatacaaaaaattagccgggtgtggtggcgcatgcctgtagtctcggctactcaggaggctgaggtgggagaaacaaccgagcccaggaagtcaagactgcagtgagctgagatcatgccactgcactccagcctgggggacaggagtgagaccttgtctcaaaaaaaaaaaaaaaaaaagagtaagattcttctatctcccaagaaccaatcatcacccaaggaggtgaatattggttcttgggagatagaagaatcttacttgcttacaggcagtctcaagggtgggggtgatattgcccccttgagaatacgtgggctaaaatttccacaaaggaggggctcagggttgtcaaggagaggcagtcaggttaggatccgagtagagtcgttagggtcatagactcaaggcggactgctgcagtcagcatcccagctcggaaccttactgagtgaccttgggcctcagtttccccatttgtaaaatggggatggtattgatgatgacactcaccttataatgtggtcatgaggattaaattaattaatacaattaactttcttagagaagtacctgtcacacagtaagaatttgataagtataagtgattattgtaattatgtttgagaaaacctaagttgtctgtaagacagaatggacggggtttgttcatggagattgtgaggcactgagcattgcaccccccacttctccaacttgaccctgatgccacccctggctgaggtgttcagtgaatatttgtggaataaatggcatctcattcacatctctgtctccactttgaatgaatgaatgacgctaaggaaatagatcacgtctcattcatcgcagtttcccctgaaattcatatactgtcagcgtagggctggtgatgaaaaaatatttgtcgaattcatgaatccgtcagtttcactgattccgttcagcagatcagcactgaatgtctaccctgcaccaggtgtttctgagcatgtgtggggggctgcttgagataagcaaggtgtactgagtaaaagcctcctcccctctcagatcctcttcactaatgcggatagacagaaaatgagcacattcacccctctttgcccagcacccaacacttgacacctgggcagcccaggacttgaccccaggacatcccatacagagttctttctgctgctctgccccacgtccctcagatgtgtgactccgggactcacttgggggacatgcagccagtctcctagctatgccaggccctgcttctgtctctctcttgctgttacctatgaacttttgattcagtttggactctcgcacacaagtaaaataaaacccagcctaaactgacttaatatttttacaggaatttattgtaaactgcagctattacgggctccagaaatagatggatccggagctcaaacatgtcagccagatttggttcctctttctgtctctctttttctgtgttctgcagctgtgctttgacagactgtgccctcgtggtggcgaagaggctgcagcagctccagcctctttaccatatgtcatcttgagattccctctcattggacctgcctgttagttcaggtgcacacccctaaagcagtcattgtggtcaggggactgtgatgcactgattggtccaggctcagtcacgtgatgcatccctgccaaattctcaccagggaagtgtaagccatctcgaacctcattgccctgcatgggactgtatcagtgaaaatctctctctgacgtgtataacttgtttcagaaactctggtctttatgggttaccattcccgaggagatcctctgcaggaagaataggtatttggtcttgggatccgctgtgatcccctgatctgtttccaccacactgggtgaaggcagatggtctgtccctccctatattgtatcagatcatgtcactcccctgtttaaaagcctttgtctctggagattcccactgaaatcagaaataaaccccaatgccttgctgcgaccgccttacctgggcccagcaccgtgcagttcctgatgacctctctgacctcctctcgcacacttgcccccttatcctctcctgaatttcactcgctcttgcttctttcagatccttacccctcagggtctttgcactttgctctttcccgtaacctagaatgttctgtccccacgtcttcatgatgtaactggctccttcctatgcatttagcaaatgccacctcctctaagaggtcttccaaatgtattgatcccctgtttaactgaaatcaacaaacataaatattcagtccagcatgtgctcagagtagccccactgtcctgcaactcaccttttttttcaccccgcactgcattttggacatctctccacaccagcacatgtggaccgacatgtgacagctttctcctctgcagcaggatggctcttcccgcccctgctgcccccgccacccctgctccttccatggcattatcccgacttgtgtggcagagacacagtgacagggcagcctatctgaaatggcgttctcaggcatgcggattgttttattaccagttaaatatgctttatgctacctgtgaatgaggccattgtgacatttagcaactgatttgattaaacacagatgtgggctagactccacgtggagcaaagatgcaggaagacaggctccgggtgtgggtttggagtttttaagacggtgagaaggacttgacgactcacagcagcaaggcagatgtggaccaggcgtcctgttggtctcagagctgagaacgcaacatgggtaccccaggaggctttgtctgctttgggttctgctgtttggtcctatccaaattgtttttttttttttaaccttccctggatgtttttattcctgtgaatttttttaaatgacaaattggtgaaatgctagcacttttgacatcttcagtggtgattatgaagacacaaaaaattatcaccgtagctcccgtttgttgaacatgtactcgatgctgggctctggcccttgtatcccacgtctcacagaaccaccacataagccagataaacaaactatgcttagctccactttacagatgaggaaactgaggcttagaaagttcaaccatgtgtccatagttatcagggaaaatcatgagttatatctgaattctctgttgtcttccagcccgttccaggctctgaaatccaaggagacaggaccctgctctttctcaaaatagaaatctcaggactgggcatggtggctcacacctataatcccagaaatttgggaggccgaggcgggcagattgcttgagcccagaagttcgagaccagcctaggcaagagagcaaaaccctgtctctataaaaagtaaaaaacttagctgggtgtggtggtgcacacctgtagtcccagctgcttgggaggctgaggtgggaggatcgcctgagcccggggaggttgaggctgcagtgagctaagatcacacgtctacactccagcctgggtgacagagtgaggcactgttgaaagaaagaaagggagaaagaagggagggagggagggaggaaggaagaaaggaaggagggagggagggagggaaggaagaagacaggaaggagggaggaaggaaggaaggaaggaaggaaggaaggaaggaaggaaggaatctcagcacgtactaggcactcaacaaagatgtgatggctgaaggaaaatgaatgagcagctgagtgaatgaaaggtttgcccaggaggtgaggggatggggcagggcttgccagctgcagccaggtctttgccttcaccactttgtattctgggtaaagaaaagaaacagagaaatagactatgaagcctgggatttgtccctttctggaacttgggctgtggtcagggtgcttgagtgggtgaattttgtaacaggctcacgcctctctacccacttgtggcttttccattctatacattatctgctgactactttttatatcaccccccccccccatctcatacctccagaccttttccacttgcagtcctggtaggttttcagcaattttattttcacatcaacatcagtaagactttattaagatggagaacacatgctttgaggtgtcactgtggaaccagtacagaggtccctttgctatggggaaagaaattgtaaggtggaaggggggatgtctgttcactgggattacccatgaggcctcctttgcactgccggggctggcatgtcagatccatgggtgaccatgagttcactgtaggttggcccaaaagaactaaggcaggcagtggcctgtgcaacttcccacaggtgtgtggaggcaggacggcctgctggctgggagtcaggctgacctgggcttgaaccctgctccaccccttcccaggagggcctgcttcctagggctgtggtggagattaaacaagataatgcatgcaaactgataagcgatgaggaagatagtaagtgctcaataaatggaggctattattactagttcattagtatttatccagctgctaatgccaacaactgaaagtcttccaagggcttggattaagttaataccgggtttggcccaggaaaaggaggaaggtttgcatggtaactgtcacctctccttaaaaagaggaggaaatccagaagacaacaagcccaaggagggatgtttagaatcatcggtcatcagagaaatgtagactaaagacaacgaatgagatgttagtcccataggctggcaaaaatagcaagtgggattatgccaagtgcctgtaggggtgtaggatgtgggaaccacctatggacggggcacccagccattcaggaaattaggtctgtgcaaccttgggacccagtggtcccactctatcccaggtcccactatatcctgaggaaactcacacacaggcccacaaggggatgggtgcgagggcgtttatggcagccttgctggtgatggcaggagagagaggccatactggtgctgaccctgggggagtcagtaggagagatgtgaaggacacacatggaaggccaggtgtggtagctcatgtttgtaatcccagtgctttgagaggtcaaggtgggaggatcacttgaggccaggagtttgagaccaacctgggcaatatagcaagatcccaatctctagaaaaataaatatccaggtatggtggtgcacacctgtagtccctgctacttgggaggctgtgggaggagaatcaattgagcccaggaattcagagctgtggtgagctatgatcgtgccactgcaccccagcctgggcaacagagcaagacctagtctcttaaaaaagaatgcaaatggtggaggaggagacatgcccacggcaacatgggtgggtcttaacaacttaatgctgggagaaaacagaaaccccacaaaacaatacacacagaatttacagaaacaaatgcctgctcccgaaacactagtgcatgttttgcactaatgcacaaacaagagaatatgcaacaggcacaccagaattagtgcctgtggagtgatggggaatgacaggaaacaaataaataacaggaggggtcttgggtgggctcataaggaaaatgtgcatgaaccaaattaactctgccttaacacccgaggtgcaggatggtgagcggggagggaccggcttctgaggctgtccacatagtttcccacgctgggagtgccacagttcctgggacataaagaatccctctgtcctttgtatagtaggtataaatctcagactacaggctcgaggggccagaaataaaactttattttcagcatgtcaatgtaatttctgtttattttgttgtttgtttgtgtgttgacatggagtctcactctgtctcccaggctggagtgcagtggcatgatcttggctcactgcaacttctgcctcctgggttcaattctcctgcctcagcctcccaagtagctaggattacaggtgcccgccaccacacccagctgatttttgtatttttagtagagacggggttttgccctgttggccaggctggtctcgaactcctgacctcgtgatccacctgccttggcctcccaaagtgctgggattataggcatgagccactgtacctggcccataatttctatttcaagccaccattcttctgggaaagtgagaaagtttcatcttagtcatttggggctttccccaaactctccagaattttggccatggttgtggaatcttactcagtgctagtctatttgtagtgctgaaggctcatccgattctccatcatcaggacccaggccactgtcttggtctaggaggcccctttgggtctggactcttcacatctgtgtctttgccacactgaggacccaggaacctttcactattctgtcttcctagagcagagatcacaacctggaagcccacagccccctctacactacaaacacagttttgtttattttgttttgtttttggttttattttttggtccaactaactcatatttgttacctgcatttaaaactcaggagattttacatacaaatccagaagccctggctacattagactcacattcttatggggcagaggttggctggagctgaatagtgttctatcagtgaggaatgcttttagctgcaagtaataacaagcccaactaatattggctaaactataatcacgttcattgtgtatttaacaagaactctctaccccaaggttcgtttggcatctcaattatataatcaaaaatcagattcattttatccttctcccattttggcctcagcatatgagccttttgcttctactctcatggcttcatggcccaacatggctgcagtcactccaggaacatcctcacatgactcgggaggaggtgtggggagtgaaacaaaagaatagtctttcccagaagcccccttggccaaaactagataatatgggccattctgaagaaggatccagcatcacatcctgcaagggaggccaggaatgcaagacttagtcttcatcagcctgggcagagggaagctatcaggggagcgaggaatcaggcatgcctgttgggaggccaagtggtatctgccacaaaccgctgctccctaaatacagcttggcattccagtttgccacagtccccaccatcccctgttgctccccagcactgaagccatctatcactgtgcctgcagcacctccttccctcactggtgttgcttgctacacctgtaaggtttggatgctgccggcctcggactcttcatgcacagaagtgaagggtccacagctgctcatcttcatcaatcgctctctctctcttttttttttttttttttttggaaatggggttttgctcttgttgcccaggctggagtgcaatggtgtgatcttggctcactgcaacctctgcctcccaggttcaagtgattctcctgcctcagcctcctgagtagctgggattacagcgcctgccaccatgcccagctaattttgtatttttagtagagatggggttttaccatgttggtcaggctggtctcaaactcctgacctcaagtgatccacccaccttggcctcccaaactgctgggattacagacatgagccaccgcacccagcccaacttcatctctttactctccttcttcccttgtctcttgtcctaccccatttccctagccttgaagaattgccctcctttaagaaaatcaggcctggcatgctggcttacgcctataatctcagcactttgggaggcctaggcaggaggatcccttgagtccaggagtttgacaccagcctcggcaatatagcaagaccccacctctacagaaaatacaagaaaacattagctgggcatggtgtcatgtgcccgtagtcccagctactcgggcggccaaggtgggaggatcgcttgagcccaggaagtcaaggctgcattgaactatgatggcaccactgcactcagccttggcgacagagggagaccctgtctcaactgaaaaaaaaaaatccctcttaattcatgtttcctgctaagccattttgcctacctcaatctaattcacagttggttcaccaacggcagccagtccacaaacagctgctggtctacagtaacaaatatggaactgagagaaaaagtgagacatgtttacagcaattagatacggccacagcatccaagcacatgatcctacgctcatctcattgcagagggtgtaggcgagtttgggactgttgcatcacagggccaattgcctgtggtgtgagttgcatgctaatcacacatcgtgaaccacgtcttagtccccaaagggttagacatttggaaacggattcttccccacagagctgagaaacacaggcgtacacctcaggtcctcccagactctcaggaggacttggaacctcaagagccaggataactcatttctgctgttccttctttccaccttgctatgccccagcttgggctccatgatccacgatgggactgtctgggaggaagaatcccaaggcagcgtctcaaaacatcaccctgacacatttgccttcctgcctgaatcctgggctcacttaccacttctcacacgtgatgacgtgatgaggaatacctggtgcatcctggacgtccaattgtccacctcggaccaccaccccaggagcacttcctcagcagagaagttgaggagaaatttccagaaaatgtacacatcctcagcattttcttgagtatctgtccattaaacatatccatctagatatgatttttaaatggtctaatccaccatgtaaaatgggatctggagttgaacaggcccctctggagtgcccccttggactgcacagctggggctgagttcgcagggaggtcaccccggtatcgcaggcaggcgctggctcttttatgcagttatctccagttattggggaaacaggaaggcatggcatcaggctccaggatcggtgcagaaaacatgttcgcttcccaaggtacatgtagcggctctcctggcagctgtaataagggaggatggctctttcgaactgaaaatattttgaagatcccaaatctcacccagattctgagcagctctggcacatgagctgttttgtgatctcagatctcgggttcgtgttacatgggagggccgggcccagcttgtcctccctctgtccagaagagccttctgcggtgaatctcagcagcctggttaacgttgagtcataatattgccaataaaaggaaagaaaaatatggaaagggggtatgcagttggtgccaaagggagagggatttgttccctcaactccggagtggggctgaaggcatctttgaacctcagatatagtctcttctctcgggcctcaaggtgtagggtgcccaggagtgtggcagaaggcgggggttctgatctttctgggcctttctgtgccctttcttttgctgccaaagcctgggagacaggccatgggggcagtgtggggaggtagtgggagcagttttgttttttaaattaaggtaaaattcccataacatagaattaaccattaaccattttaaagtgtacaactctgtggcgtttagtgcgttcacagtgttatgcagtcaccacctccaattccaacacattttcatcgccccaaaaggaaaccccataacctttaagcggtcatgtctaatactccatcccccagccctggcaatcacaagcctacttttttttgtctctgtagactatcttattctggatactttatatgaatacaaatccctcagtatgtggccttgtatgtctgacttattttatttggcataatgttttttgggtttatttgtgtgtgtgtgcgtgtgcgtgtgtgtgtgtgtgtgtgtgtgtgtgtgtgtgtgtgttttgagacagtgaggcaggagaatagggtctggaggcagagaacctaaggccaattcatgctgacttcctagaactgaatcaaaaggaaaaccccacctctgcacacccaagtaacaaaagaatcagaggctactccctttgcaactccctgccccttttccactttgttgcagatgaaaaggagaaagtacctctgattgtgggccaagtcttcatttgcataggttataactttgtaactttacttcagcctctggtccttccttgcaaccagactggccgtgggccaagtcttcatttacttaaggtgtaaccagataaccaatgggaaacctctagaggatatttaaaccccggaaaactctgtaaccaggactcctgagctgctcccaccactctgtggggtgtaatttggtttcaatacatctgtgcttttgttgcttcattctttcattgctttgcttttttgtgcattttgtccaatcctttgttcaaaatgtcaagaacctgggcgactaatagtcaaggccctccaccagtaacaacagggtctcactcccattgcccaggctggagtgcagtggcgccatctgggcttgctgcagcttcaacttcccaggctcagatgatattcctaccacagcctccagaagagctgggactacaagcatgcatcaccatgcccggttaattttttgtatttttagtaaagatgggatttcaacatgttgcccaggctgatctcaaactcctgggctcaagtgatccaccctcctcagcctcccaaagtgctgggattataggtatgagccaccatgcccagcctcatttggcataatgttttcaaaggtcatccatgctgtatgtagcatgtatcagaatttcattcctctttatggcggaataatattccattgtatggctgaaccacattttgtttatccgttcagccgtcagtggacacttggatcatttccacctttcagccactgtgagtagtgctcctgtgaacttttgcatacaagtttttgcttaaatacttgttttcaattattttgggtataaacccagaagtacaattgctgagtcatatggtagttttgtatgtacctttttgaggaatcatccagtgttttccacagctttttatgcaccgttttacattccaccagcgtgtgtgagtgttccattcctccacatcctcaccaacacattttttctttttctttttctatctttattatggccaacctagcgagtgtgaaggagcagcagttttcagcccagacactcgtgttgggtcatgggacctttcccactctgagtttctgtaaactgaaggacaatgcccaccttagagagtagacagcagcgtcacataagtcactgtacatagcatccccagcacagtgtccaacatgagagatgctgttcactggggcactgtattagtctgttctcatgctgctagtaaaacatacctgaggctgggtcatttataaaggaaggaggtttaattgactcacagttccacatggctgcggaggcctcacaatcatggtggaaggcaaaggaggagcaaagtcacgtcttacatggtggcaggcaagagaacatgtgcaggggaactcccctttataaaaccatcagatctcatgagacttattcactatcaccagaacagcatgggaaagatctgcccccatgattcaattacctcccaccaggtccctcccatgacacgtgggaattatgggagctacaattcaagatgagatttgggtggggacacagccaaactatatcaggtaccaaggccacctccaggcaccatattacccagtgcttctcattctcactgtcatgaaggacaagggcttcttcccccatttagcgtaaaataaaaatgaatcaccagaatatgtattctcagtaggggaaatatcatcccaagaggggaaaaagtggtccctgggagtggagcaaaaacacatacacatacagtcccaaaacagatatacagtctaactataatagtaaaatttcatgggaggtggggcaattaggggagaaaaaaaaattataaaagaaccctggcgaagggtggcaataatgaaaaaaaggttgagaaacaatgaagtttaaagcaatttaaatttgtttaatttttattttataatttttaataaattaaaagcgtgatttttttattagatttaacaggcataaagtactgtattaaattgctctggaggtttaaatttctctatttatctcagactggtaataaacacagtggctttcaatttctctatttatctcatcatagactggtaataaacggtttgtgagcaggcaccaatctgcagttcacacctcagtagtgctgtgcagaagcatcactgcgtctttgtctgtctggaattatctcacttccttatgtatctgttcatttgattgttgtctgtctctcttacctgaatgtcagtgtcaacaccatatctaaaacagtgtctgccacacggtgatatttggtacatcactaggaaatgaattgttgaatgcctgagggaatgaatgaacaaattaatgattgaatgaatatccacttaaaaattgttttgctggctgggcatggtgacttacacctgtaatctgagcatttagggaggccaaggtgggcagattgcttgagcccaggagttcaacaccagctttggcaacatggcaaaactccatctctacaaaaaattagccagatgtggtggcatgctcctgtagtctcagctactcaggaggctaaggtaggagggtcaccagagtctgggaggtcaagactgcagtgagctgtgatcatgccactgcactccagcctgggcaacagagtgagaccttgtctcaaaaaaaaaaaattattttactgagtcaggcactggaggctacttttacttaaaacccaagaaaaccaatcaaccaaaaatggtagcagttctctgcctttgacagagactcaaaatagcaatgtcttcaacaagaaagaagggtatttctctctcacctaaaagtcctaactaatgtggccattctagtctgcaaacgtgatgggggtccaagctcctcatgtcctgttgctcagctgcatatccaagatggccccattccatggagaaagagaagctgccactgcccttcaaaatttactcctatccctttgcctagaactcatcatgtggccacatttagccatagggaatctgggaattgtagtttttattctaatcagccatgtgctcagcttagaaacagattctattaatatgagagagaaggggtgaatcaatattaggggaccctccaggagacctgccaccatcaccttaagaggatgtttttttcatctcatctttgccttccctcactgggcattgtatcagccagaaggaagaaagaggtcagtgtttcacattccagcaccaagctgggtctgtttgtcaaaaccctccagagaccacaacttgtggcacaagacttcaggggccacgtgcccccttcttcctgggtcctctctggcacaggatggatttctcactgcaggcactctgtggctgccctcacgctgtagtttgttcagctgtccattcttcagctgaccctgggtcacaaaatgaaaataaacaagagactattttggagaaagcataccaagggacaagacgatagcctgtttatttccaaacctgccctgagtcatcattcagaaggttcatgcaaaagaaaagagaaatcagaagagaaaacactgcagtcaggagtcttctgagacaggtggcttcctaagcttttgcaagtagggtcaccatggtaaccagaaccaaacagatgacctcgaatggaatagactgacctagaccttctgctaaatgtgtctgggcaggacattgaggatagagtgggattttgttgactatagtcaacaaaaatttaaatgtacattctcaaataactggaagagtataattggattgtttataacacaaaggataaatgcttgaggtgatggataccccatttaccctgatttgatcattacacattgcatgtctctatcaaaatagctcatgtcacccataaatatatacacctaatatgtacccacaaaaattaaaaatttttaaattaaaaaaaaatttaatgtaacgaaccaaattgtatattgagctgttggcacaaccacatagagaggaactatcttaaatgactttatttacacatatttttattcttttcctttttctttcttccttcctgatgtttccagcttttttatccttttctttctatgagaagaatttcctgtacccattctttctgggtagagctgctgtaacaaattcttttggttttccttcattcgaggatgtcttagttttcccttcattcctgaaggatattgtctctggatatagcattctgagttgatgtttcttttccttaagcccttgaaaaatgttgtgccatttccttccggcctccatggttcctgatgagaaatctgctgtcattcctattctttttcccttattctggcacattttgtttgattaataaatgaatgaataaaagaattaatcttagcttcacagcctactagctttatgacttgggaaaaactccattcctaagcctcagtttctctgtatggaacatgggaatggcaattatataccttcctctcaggatcgatgtgaggattaagtgcagttatatacaaagtgcctaatacagtgcttggtgcataaagcactcaataatctcagtggaatgaataaatgaatgcatgcatgaattaatgaactaattaatggcctcagtatctttgtgtagagaagccatgtgctgccatggaaaggccctgagctgggaagcatgagacaggcttaaggccttctctgctgccaagaccaaagcacaggatcagcactgtttgccttccctctttgtgcctcagtctccccatttggaccataaagaatttggcatggactattggttctcaattctcagtgtgtactaggatctcccagaaaggtttgttgttgttgttgttgttttcatatactgatgcctggcccaactctagactaactcaaatcagactctctgtgggaagggccctcagactgcttttttgttctgttttgttttttgtttcaagttctttgggagattctgatgcagaacaagggttgagatcctatggttctgatggatccatcatcttggataattttagaggtgttgtggttcctttattatcctcttatcttctcctacctcaccccaggaagtaagtttcctggagtccattgtgttcattttagccactttataaaaagtagtgtgggctctagaagcttcttgtttgatgtaagtcaccgctcatttgagtagccatttgttttctaaccagcaactagtgtgaatgtttagagatgtgcctgcagttgtgcggttgctgctttaaaacctctgacagcagtccatgccccttcagcagatgcaaaccatgctccaggcttccgggtcctgaagcatccagccctaactttcttaatctggcctcatcttataaaagaagtctgttgattcagtccaattcctaccaaaatcccagatggtgtttagtagaaactgacatgcaaagtaactaaaagccaaaacaaacttgaaaaagaacaaagttggagaacttatactacctggtttcaaaactcaccataggccgggctcagtggctcacgtctgtaatcccaacactttgggaagctgaggcaggtggatcacctgaggtcaggagttcaagaccagcctggccaacatagtaaaaccccatctctactaaaaatacaaaaaattaactgggcatagtggtgggcacctgtaatcccttgggaggctgaggcaggagaatcacttgaacctgagaggcggagattgcagtgagcctagattgcgcctctgcactccagcctgggtgagaagagcgagattctgttttttaaaaaaaatcaccataaagcttcagtaataaggataggatggaattggtataggatagataaatcagtgaaacagaataaagtccagaaataaaccttctcatttatggtcagtttatctttggcaaatgtaccaagtaattcagtgggggaagaaatggataccccttctccatgatgtgtttatatcatatttcatacttatatcaaaacatctcatgtaccccataaatatatacacctactgtgtacccacaaaaattttaaaaaataataaaatcagtgggagaaaggatagactttttatagtggtcctggaacaactgtgtgtgtgtatatgtatatatacacacatatacatacatatatatgcacatatatatatatgaaaagatgaatttaagtccttaatccacactgtatacaaagattaacttaaattggatcatagacctaaatacaagaatactgtgaaatttctagaagaaaacacaagagcagttctttgtgaccttgaattaggcaacaaaagcaaaatgcatcaaagaaaaaaatcaacaacctacaatcttttgctcttcaaaagacaccattaagaaaaagacaagccacaaactgggagataatattcacaaatcatgtatctgatcaaggacttgtgtccaagatatataaagaactcttataacagtaataagaggccaaacctaattttttaaaaagatttgactagggtttgatgggaaaaagatttgagtagatatttcatcaaagaagatatgtgaatggctaaaaagcacatgaaaaatgcccaacaccattagtcattggagaaatgctacttaaaaccacagtgagatacaaccacatacttcgtagagtggctgtaatcaagaagactgaaatgaccaagtgctggagaatcgagaactctcgtgcattaccagtcagaatgtaaaatggcacagccacttaggaaaacagtttggccatttcttttaaaaggtaaacatatgcttaccacacaactctgtaattctactcttagggatttacccaagagaaatgaaaatatatatccatacaaagacttgtatgtgaatgcttatattgcattatccataatagcccaatattggatgttgtacatctatgccattgtgcattgttgtttaatgggtacatagttccaattttacaagaagaaaaatgttctaaagatgaatgatggtgatgagtacccaataatgtggatgtagttaatgccactgaactgtacactttaaaatggttaagagggtaaattttatgttgtatatataccacaattttttaaataaataatttttattttttattttatttactgttttctagagacagggtcttgccgtgttgcgcaggctggagtgcagtggtgagattgtagtttactgcagcctcaaactcctaggttcaagcaatccccccgcctcagcctcccaagtagctggaactataggcatgcgccaccacacctggaatttttttttttccaagatggagtcttgctctgtcacccagagctggagtgcagtggcacagtcttggctcgctgctacctccgcctcccgagttcaagcagttctcctgcctcagcctccctagtagctgggattacaggcacacaccaccacgcctggctaatttttgtatttttagtagagacagaatttcaccatgttggccaggttggtctcgagctcctgacctcctgatcctcccgtctcagcctcccaaagtgctgggattacaggtgtgagccactgtgcccagccaatgttttaatttttttgtagagacaacatctcactatgttgaccagactactagagtggccataatcaagaagactgaaactaccaagtgctggagaatctagaactctcgtgaattcctagtaagaatgcaaatggcacagccactttggaaaacagtttggccatttctttaaaaagtgaaacacttaaatgaccaaactccggggctcaagtgatcctcccacctcagcctcccaaagcattggaattacagaaaaatctgaggccaccacacctggcctcaaattttttaaaaacataattattaaggaccaggatctgggtagtgggcactatctcacttatttctcaccatagccctttgaaaaggacaccgtttattttcttcatctatccaggaaattgaggttcagagaaatttggtaaccaaagtcacaggttccatcccagcctgtcagacctcaaagaccccacctggccatggtaccctcctcctgcatgttcctctccgactgtaagaaacctaacctggctcttgggtctgggccgccaacatgccatccggacagaggaagatccagagacttaggggtcacgtgagccatagccacggccgcatcagcaagcacttggaagcacccaggaggccgtggtgatgctggtggtaggcgtcaccagaggattagtgtcaacaagtctcacctgggttgctttgggaacgctggtgtgaggcattaccactaggaaccagagcttctgcccagctgtcacccttgaagccacatggagggaggttcatgaaatgctaacaactgctttaaagagaaaaaaagacaagaaccctaacctgtacccctgttcctccttcccacaggcacaacagggttctatcaaggaggaaatggactgggcaacgcagccggtttcgggagtgtgcaccaggtagacatggctccctcccgattctttcctcagttctttctggaaatattccccttacatcagggcacccagagagcccacgacacacacaatccccattgggaacctgcctcttagtccctgggtttggagactacaggggctagattgtgcaaaaggctgctggaaggacacagtatacaggcggagacgtaggaattgttagaagattcctgagatgtcatggagatctacaagtatgttccatcttgacctggactcaggacacccattgactgttgaatctgatatatatcaatacaaatgggtgggttctttcaccagaccatgggcttctcaagggggaccgtatatcttgctcacctctgcatccccagtggtgagagcccagcacacagtgggggctttataaatacttgttaaatagagcaaagtcaactctatataggtaaatgttggctagtactttgattctcttggtgtcacttacaaagtgaattaagagttcgcatctgctcaaagtgtgcagtaactctgctgtgtgtacaccttccctgtacacctaaaattatttcaaaacaaaaggttcacctgctttcaggctaccatttaaaacagaaccaccctggggtagatgggctttaggaatatttaacatatttagatctgaggaatacgcaatttcttttccagtgagaatctaaataatttaaaacttagcaaatgtaaaaattgtttcatgtatttttgcattatttctaatgtactatgtacatagataaaatacttataaataaaacagtactttttaagatgtggttcttaaccctccatttcaccattaaatctgtgtttttcaaaaacactgaccacccccgcaacccccacccccaggaactctgactcccagctctggggtggggcccaggaagcagaacgttccatgagttccgtgcagggttgagaagcactggtttggtgatagtgcggcaggatatttgaaacaatgactgttggagaattgggatcgctggtctgcttaaacaaagcttgatcaaaggtgattggcagctattgaattgatctccatgactccctcatagaatattctggacccctaatgctgtgtaggtgctgctgtatttgcacctcctccccatgaacataaaatgtcacctagtctcctgggtttgtgtgtcgtgtgggtgtgtgtgcggtcttctaggtttgtgtgtgtgtcgtggggggggggtgcagtgtggtcttaattgttaatgcatttgtttattaatttaaccagtatttgttgagttactgcatataccaggcactgtttcaggtgcagaggatacaatagtgaccaggacaggtgccatcagggccacgtctatatcccttagggtggcctgtggacctccaggtgccagcatctgcatgcctgggcccaaggggcttttctagaaccagtgcacggggcaggcaggaagtgcctgggaattaaagccccctgggtgcagctctcaaagaccaacaagttgatgtataaacccctccactcccttgacccgtgggagaggcagttctgagatgtggattttagaccatctcagcttttcctcatagggctcatctctggtcactaccacagaagcacctatgcaggctgctctcccgcatctctctcacttccccgatcccctgctggtgtctccttcaccttccaaacagcctccttgcacttgaatccttgccccggggtctgcttctgggaaaccaaaatgaagacagtttctgcccacagagagcttttattctaatggtgagacagagtggccaggctgaccaacggcccgagcccagaaaggcttcctcacatatgtccttggtttgtttttctcttcccaggactatccttcctaccccggcttcccccagagccagtacccccagtattacggctcatcctacaaccctccctacgtcccggccagcagcatctgcccttcgcccctctccacgtccacctacgtcctccaggaggcatctcacaacgtccccaaccagagttccgagtcacttgctggtaggtgcagtcactggtggggccattcatggctgtggtctgagagcttctatgaaggagggacccgcacatgggtcccaattgtaacaaacaggttacccaagggtcattcatggatgtggcctgagagcttctctgaaggagggacctggatatgggtcccagttgtcacaaacaggctcccaagggctaaatccatctctcagacatgttttgttggcctgtttgtgcatgtgtttaattgcatttacgtttaaaagtcagaaaattttataaatacctaaaaattctattttctggcttcttttgaaagaagatctggccatagtagccacattcccaaggaacaccacttggttaaaactaagtgtgtctgctctttttagaaaggacacacccaattccacatctagctagcttaccccatgttcattactgcctggcccatgtaggccttggagttgatgaaccctggtagtatttataatattaccagctgggcacggtggctcacacctgtaatcccagcacttttggaggctgaggcgggtggatcacctgaggtcaggagttcgagaccagcctggccaacatgatgaaaccccatctctactaaaaatacagaaattagcctgagtcatggcaggcacctgtaatcccagctactagggcggctgaggtaggagaatcgcttgaacctgggaggcggaggttgcagtgagccgagatcgcgccattgcgctccagcctgggcaacaagagtgaaactccatctcaaaaaattaaataaataaataaaatacccatctgtttcgtgctgagcacatacctgtgtggtcttctctaatcatttacttatatatttattcaacaaatatttggtaagctcccactgcattccaggccctccctttagtttgggaaataaagtgcagtgtagagttaagctttgcagacaggaatcaaataatcatacaaatatctcattacaaactgtgataaggagaggcataatcctcacaaaaacaggtttatattatccccaccctttttctagataagaacaatgaagatgagagtgataaggagcttgctagtgattggtggggctaggatcccaatcccagtttgttggcccccataaccagcactcctgctatgcactggccatacacagccaggaactgtgtacacagcctggctgtgtacggccaggaatatgttatctaaaatccgtttgagaacagaagggcagaggctttcaaatgttgattctttgtctaagaggggttcaagtatagcgactcagggtcctcaagaattatacaatccttcaaaacatccttaagcatgttcattttttttttctttcaacttgtattttaggtttggggtacacatgcaggtttgttacatgggtaaattgcatgtcgtggaggtttagtgtacagataattttgtcacccagataatcagcacaatacccactaggtagttttccagtcctcaccttccttccatcctctaccctcaagtaggtccttgggtctattgttcccttctttgtatccatgtgtactcaatgtttagctcccacttataagtaagaacatgtggtatttggttttctgttcctgtgttaattcacttaggataatggcctctagccctatccatgttggttcaaaggacatgatcttattttttatggctgcgtagtattccatggtgtatatataccacattttctttatccagtttgccattgatgggcatctaggttgattctttgtctttgctattgtgaatagtgctgcaatgaacatacacatgcatgtgtctttatggtagaaaaatttatattcctttggatatatacccagtaatgggattgctggtatatatccaaatggtagtttcattttaagttccttgagaaatcttcaggccgctttccacagtggctgaactaatttacattcccatgaacaatgtataagcattcccttttctctgtaaccttgccagcatctgttattttttgactttttaataatggccattctgattggtgtgagatggtatatcattgtggttttgatttgcatttccctaatgaccagtgatattattttttcatatgcttgttggctgcatgtatgtcttcttttgagaagtgtctgttcatgtcctttgcccattttttaatcgggttatctttaaggatgtttgtttctgatggcacaatagttttaggaaacccttttgattagccaagattttttggcttcaaaagacatagaaaatccaattcaaactagtttaagaaaaagcaaatgaacttttaggcatatctaacctagatgtacaggggtttagagctaggtccaggtgttccaatgacaatgttgagacttagtttctctcttccttctggctctgaattttcctgggttcgttccgttctcaggcaagctcctcccctatggtggcaaagatggccaccagctacccagagctcaatcctgtctgctaatccatcccagcaaacatagttcctccttcttagccattcctgcaaaagtcccaagtaaagctcccattggcccagcttaggtcacatgctcatccccaaaccaatctctgtggtcagtggaatggaatgctgggatgaagcagcagactttgggctcatgcctacggctggagctagagttggggtcagcctcacctcaaccaccagggactgagagtgaggaagaggtgatcacctcaaaaaacctagagcattgtaactacaagaagacagaagagacaatgggtgagcaaaaacaataaatgtccacaaccttgatatggatgccacctacactatgagcaacatgtggcagagtccatgtcctgacccctctgtggtcacagaacttagtatgtaacatccctatgcaactaatgcaccagcctgtggattcattcattcattccccagacctgctatgcacatcttctcttttacaaggtggttttggcttatcaacattaaataacatggcagcaatacgttagaatgtcagtagatatcactgagtttcgttcctttgtcttcttttctgaaacctactgatgctgtagggctttgcagaagctaagctagcacgatggtgtggagacagtcatcaacaaatattaattggttgattgttagaaaaggaacaatagggaagacccacctgttttgttcctggggttcttggtgtggctattgattttagcccttaaattttccatcactgggaatgagtgagttatccttggtttgatgacaaatggagacaatatggcaaagcatgttaaataaagtcaactttttaaaaggtttagagcttgagcattgattttggtcattgtgatctcatcccagaatatttaatgatgcatagtacctatttaataactttctttgaagagtttgaagtttaacaaagtttttctctgtcatcatcttgaattatctttagccatcctgattttcagaatgtggttcttccgatctcatttcaacaaaggagataaaaacaaaacattgatgagaaattagggcagagaggaactataagcaggaaaccatcgagtagatgccactatccgtctataattcaatggtgaactgaatggcaaacgaaaaacttacctccccagaatttgagttttgtgggaaggttctcttcattcccatcaggagtgaatataaaggctcattgtgtctttgaaatttttctgtcttgtttccctctgttcttcctttatcccttgatcaaaggttcaacagtaagtggttgagatggtttttactgtgtgtctaacaagctgacataaaatctaatgacgtaaataatggtcagctgtagctgaggtctcctgcctctttttcctagtgttcactgtaaaggaatttaagcatatgtgtgtgcacatgtgcacgtgcgcgcgcgcgcgcacacacacacacacacacacacacacacacattcatgcactctttttaaatttcccataaaaactctacttttgaaattatccaggatatccttgagtggttggttccaaactccagaggctctagaggtttactgacagacagatcacactcactgtgtgcactgcctggatatagtattttggtgctctcaccactcacatcccccatgcaccccatcctcgccacaggacactctgcattgacatgcattaatgtgtgtgtgaagtgccaacaatttgcagatgattacagggcaatttgctgatatagagggcagaatctgaacatctcatgttacttaagagaaaaaccaaatcattggttacttaaggatttttttctttttacatttttaaatatgatacaaattatctaaaaagaagttgaaggattttttaacttctaagatcaacttcctttgccaagagaagaagaatttttttaatctctcaagaagaaattgggaaggctcttccgtgtaatttggcaacatctaacaaaatttaaaatgcatagaccttttaactcaactattcgacatctaagaatttatccgaaagataaactttgacctaggtacaaacacttaagtaaaaagaatacttatttttttcactgattaaaaatttattaatactattatgcaaataattttagtgataaccacaagggttttgtactgttagtacataaatacatacaaaaatgcattttgaaacttcttgtatcccctttatccttttcaatttctgtttatgtttgctctacaatatatatgatggatctgtgcagtagaaaattttttgctgatgagtatggtacaatcagaaatgtttggagactgtatcagtttcttcttgctgctgtaacaaattattatgacctttgtgtcttaaaacaacacagtgatattttacagttctggaggtaagaaatgcaacatggctctcactgaactaaaattgaggggtcagcagggttatagtattggaggctccagaggagaatcacttccttgcccttctacctgcagaggccacctgccttccttggctcatgaccctgcatcattccagtttctacttacattgtctcatctccttctctaactcctgcccccgaccccttataaggactgttgtgattccactgggcccactcagagaatccaggatcatctccccatctcgaagtccttaagtcagtcacatcaagaatatttatttttttaaaaaagaatatttattgcagcagcatcatagcaaaaggctggaaacaacctggataccatgccattaacaggaaacaggttaaatcaatcatggtgcatccaccagtagcatactatacagctgttaaaaagaataagttagatatatttgtgctactatgggtttctctttgagctattgtgataggttaaaaaaaaaaagcaggaggcagaattacatgggtaatgtgagcctgagttttttaaaagtttaagtgtagcttaatacccatatttactcatattccataaggaatttctagaaggatgcaataagaactgttaatagtcattttctctggagaggaaaacaagatctggagtgaaaggaaaagactgtatgtaacaggcaatctgtagaacactccacccaacagcagcaaatacacattcttttcaagtgcacatgggacatttaccaagataaatattaatatcttctgggccataaaacaagtttcagtacctttaaaagaatcaaggcatacaaagcatgttctctgacagcagtggaattaaattagaaataaatttcagaaagatttttgggaagttcccaaatcttcagaatctcaataatatacatttcagtgacccatgggtcaaagaagaaatcaatgggaaattaaaaagcacttggaactgaatgaaaatgaaaacaaatatatcaaaatttatggaatgtcattaaagcagtacttaaagggaaacttacagcacgaaatacctgaattagaaaagaagacacaattaccacaggtatcaggtgaaggaagggagggagggaaatgagggaggggggagggagggaaatgagggagggagggagggaaatgagggagggagggagtaaaggggagtggaggggagggaagattggtcaaaggatacaaaatttcagttaataggaataagttcagaagaactattgtacaatatggtgactatagttaataaataaggtatttgtattagtctatcttcatgctactgataaagacacacctgaaactgagcagtttacaaaggaaagaggtttaatggagaactcagttccatgtggctggggaagcctcacaatcatggctgaaaaaaaggagaagcaagtcacatcttacgtggatggcagcaggcaaagagagaactcgtgcaggcgaactgccactttcttaaaaccatcagatcttgcgagactcgttcactatcacaagaacagtgcaggaaagaccctccttcttaaagagacaaggtcttactctgtcacccaggctgaagtgcagtggtacgatcatagttctccgtaacctcgaactcctgggctcaagcaatcctccctcagcctctcaagtagttgggactacaggtgtgtgccaccatgcgcagctaatttttaaattttttgtagagatggggacttgctcctccttgtcttcggccatgattgtgaggcttccccagccacatggaactgagttctccattaatgctctttcctttgtaaattgttcagtctcaggtatgtctttatcataattcagtcacctcccactgggttcctctcatgacatgtgggaattgtgggagttacaattcaagatgagatttgatggggacacagagccaaaccctatcagtgttatatacttgaaacttgctgagagagtagattttaagtgtttttagtaaaaaaaaaataaaaaatatgtgaatgttaattagcttgatttagccatccccaatatatacatatatcaaaatatgttgtacatcataaatatacacaatttttatttgtccagttaacaaatcatcatcatcatctacagggttgctgtgaaaattgaaataaaaaggccgggcatggtggctcatgcctgtaatcccagcattttgggaggcacaggcacgtggagcacctgaggtcaggagttcaagaccagcctggccaacatggcgaaaccccgtctctactaaaaatacaaaaattagccaggcgtggtgccacacgcctgtgatcccagctactcaggaggctgaggcaggagaatcacttgaacctgggaggcagaggttgcagcgagccaagattttaccactgcactccagcctgggtgacaaagcgagaccttgtctcaaaaaaaaaaaaaaagaagaaagaaaaaaagagagagagagagaaagaaaaaatgtgcattgcctattattattattttgagacagagtctcgatctgtcgcccaggctggagtgcgatggtgtgaccttggctcactgcaacctctgcctcccaggttcaagtgattctcctccctcagcttcctgagtagttgggattacaggcgcccactaccatgcccggctaatttttgtgtttttagtagagacggggttttaccacgttggtcaggctggtctcaaactcctgacctcaggtgatccacctgcctcagcctcgcaaagtgctgggattacaagcgtgagccactgtgcccagccaaccctgccaattattaagtaacatgcaaatataaataatgattaatgaaaatatatttaagaactcactttaacccagacagttaaatataataattttcatccaaagatatgattatttaacttaatttaaaattttttaaaaataagaaaagaagaagtaaaacttcatgaagtaaagagataaaatgacctggtcacctatgtagaaaatctgatggaatctatgaaaaagctactagatctaaaaagtaactttagcagtgttgcagggtactaggtgaatatctaaaaatcaacaaacaacaggaaatagaatattttaaatgccatttgaaatagtatcaaagatgtgaaatactcaaggttaaatttggcaaaagatatgcatgactttacactaaaacctataaaactgctgagagaagttaaagaaggcattaataaatggagatatatacctggttcgtgaatcagaagacttaatattgttaaaatgccagctcttcccaaattgagctataagattaatacaatctctatcaacatctcaggctttttttaagaaactgtcaagctgtttctgaactttaaatggaaatgcagaggaccaagaagggccacaatgacttttgtagagaagaacaaagttagagggctaagactacctgattttaaaatccattttaaagccacagtacttaagacaatgcagcactggcataaaaatagacaaataaatcaatggaacagaattgagagttcagaaataggttgggtgccgtggctcgtgcttgtaatcccagcactttgggaggccgaagagggaggatcacttgaggccagaagtctgagaccagcctgagcaacatagcaagaccctgtctctgcaaaaaaataaaaataacccaggcagtgggttgtgcctgcagtcccatctgctcaggaaggtgaggtgggagaattgcttcagccaggggtttgaggatacagtgagctatgatcataccactgtactccagcctggatgacagagtaagaccctgtctccacagtaaataaatgaattaacccacatgtatatggtcacctgatttttgacaaaagacaattcaatggagaaaggacagtcttttcaacaaaagatgctggaacagccgagcacagtggctcacgcctgtaatcccagcattttgggagtccaaggcaggtggatcacctgaggtcaggagttcaagatcagcctggccaacatgatgaa[141 bp omitted]cactgcagcctgggtgacagagcaagagtccatctcaaaaaaaaaaaaaaaaatcgtggaacaactgattatctatacttcatacctcacatgacacacaaaaaaaatgcaaaatagatcatagacttaaatataaaactgtaatcttctacaagaaaacataggagacagttttgtgactttgatttaggcaaagatttctcatatgtaacaccaaaaatatgatccaaaaagaaaaaaagaatataaactggacttcatacaaatttaaaactgttcagagaatgaaaagaaatccatggtccaggagaaaaataattgcaaggcatatctcgaataaagcatgtgtttatatagaatatagaaggagtgttcaaaatccaataataagaaagcaaacaatctgataaagaaatgggcagggccaggtgcagtggctcatgcctgtaatcccagcactttgggaggccaaggcaggcaggtcacctgaggtcaggagtttgagatcagcctggctaacatggtgaaaccctgtgtctactaaaaaatacaaaattagctgggtgtggtggcatgtgcctgtaatcccagctactcgggaggctgagtcaggagaatcgcttgaacccaggaggcggaggttgcagggagccagaattgcgccactgcactccagcctgggcgacagagtgagactttgtctcaaaaaaaaaggctggctctgtgcagtagctcacgcctctaatcccagcactttgggaggccaaggacggcagattgcttgagcccaagacttcaagaccagcgtgggcaacatggggaaaccctgtctctacaaaaaatacaaacattagacaggtgttgtggtgcaggctcgtagtcccagctactcaggaggctgaggcaggaggatcgtgtgagcccgggacatcaacattgcagggagctgtaattgtgccactgcacttcagcctgacagagtgagaccctgtctcaaaaaataaagaaataaaaataaagaaatgggcaaaatatttgaacagatgatagatgcctcaccaaagaagatatagggatggccaaaagcacatgattaagatgccaaatgtcattaatcattagagaaatgcaaattaagttcacaatgagacaccactacatacccactggaatggctttaatcacaaagacggaccataccaagggctggcaaggatgtggagcagccagaactctcatccactgctggaaaatggtacaaccactatggaaaataattcatctgtttctttctttttttttttttttttttgagacaggttctcactctgttacccaggctggagtgcagtggtgtgatcatagctcactgcagcctcaacctcctgggctcaagtgatcctctggcctcagcctcctgagtagctgggactatgggtgtgtgccatgaaacccagttaatttttgtattttttgtagagacgggggtctcattatgttgcccaggctggtctcaaactcccagggtcaagcaattctctcaccttgacctcccaaagtgctaggattacaggcatgagccaccatgcccagcctcatccattttttcaaaagttaaacactacttattatatgacctagcaaacaagctcagtaaaaataaaaagcttacatctagaccaatgtgtgaattaatgttcatagcagccttattagaactgaaaactagaatcaacccaaacgtctacctacaggcgaatggataaacaaattctgatgtatccatacaattgaatagtactcagcaatagaaatgaaatattaggctgggcatggtggctcatgcctataatcccagcactttgggaggctgaggtgggcggatcatgaggtcaagagatcgagaccaccctggccaacatggtaaaatcctgtctctactaaaaatacaaaaattagctgggcgtggtggtgcatgcctgtaatcccagctactcaggaggccaaggcaggagaatcgcttgaaccggggaggcggaggttgcagtgagccaagatctcaccactgcactccaggctggcaacagagggagactctgtctcaaaaaaaaaaaagaaagaaagaaatgaagtatcgataaacaccgcatgtactgaatctcaaagcaattatgctgaccaaaacaagccagaaaaaagaatacatactatatgattccaattgtttaaacctctagaaaattcaaaccaaagtctatagtgaaagaaagcagtttagtggttttctggggagggtaactggaggaagagcttatccaaagggataacaaggaaattcttggggtgctggatttgtttattatgttgattgtggcaatggcttcacagatgtgtacatacgtcaaaacttaagaaattgtgtactctaaatatgtctagtttattgtatgtcagttgtgcctcagtaatgcgttaaataagtaaacacattaaaagagagaaagaaaaagaatgaaattactccaagaaaggtttacataaattgtgctatcctgtggatctctgactgtgaccttgaacttttactctgtattagtctgttctctcattgctataaagaaatacctgagactgggtaatttataaagaaaagaggtttaatggctgggcacagtggctcattcctgtaatcccagcactttgggaggccaaggcaggcagatcacttaaggtcaggagttcgagaccagcctggccaacatggtgaaaccccatctctactaaaaatataaaaattagccaggtatggtggcgtgtgcctgtaatcccagctaaagaaaagaggtttaattgtctcatcattcctcaggctgtacaggaagtatggtgctggcatctgctcagcttctgggaaggcctcaggaaatttgcaatcatggcggaaggtaaaagggaagcaggcacgtcttacatagccagagcaggaaaaggagggggtcaggggaggtgccacacatttttaaacagccagatctcatgagaactcactcactgtgcggtacccggggaggggagatggtgctaaaccattcatgagaactccatgcccatgatccagtcacctcctaccaggccccgcctctaacactaaggattacaatttgacaggagatttgggcggggacacagatccaaaccatatcactcctcattctcaagaatgtgtacgtttgggtaaaggcctgggtttttctgtttgtttttttgttgtttttttttttggcacccctgcgaaattggtttcacacagaccttattttagacatttcttagataactagcatttacccctctttttaatatttgcctgttttaatggggggggcaaacaaatgttttctaagcccagtagccttaaactaccaagtgaaccaggaaagaccttatttacattgctcttcagcatctgtgaattgagaagaaattctttttccagaggaaagtctttgctcactcaatgtttgggaatctctcatgctgcatcctgaagactctggggaggtggaaaacacccagccatcctgacagcgcaaaatcatgtcttgtcttattatgtccttagtctgttaagaagcttttataaatattaaataaacaaagttcagtcccttgggtcttaaagggaaatagttctttcagtgtagaaaaaaactctccctagccaagtctttttagacaaaggattttcccctgatgatccaagaactggcaattagggcaggaaggatggggtctgtgtgacacatttgggagctaaaccaagcaactgtaaagtgagaaaatgggatgggatgtcctcgaaggttcacgctgttttacagttctgtcactcacgagtgacaaggacaggtccaaattttagttctggctttgccactcatttgcagactcacatggtccagtaagtcacctcactaaacctgagttacctcgttagctaaataaggatagtaaagtacaatcaaaagccatgcatttaaaacatctgtgcgtaagcagcaacacagctctgatgctggctttaggacctgggtcggggacagtgctgcttcacttgttggggaccactagacaatcgccggtgggcacaagtgtgacagcctctcagtggggccacacccaggagcaccccaaagtgagaagcagcaaggacccacattctgtgctgcgtctctcactaatccacacatatccatgggttgactccagccagaactccattcaagtcacctcctaactgccaggcctgtgctagatgctctcgcctatataatctcatttacttctcagattgacagctctcagcaggtaaagcttaaaaggcttgcatttaatagagaagtggcggggcacagtggctcacgcctgtaatcccagcactttgggaggccgaggcaggtagatcacctgaggtcaggagttcgagaccagcctgaccaacagggtgaaacctcgtctccctgtctctactaaaaatacaaaaattagccgggcatggtggtgggtgcctataatcccagctacttgggaggccaaggtaggagaattgctgaatccaggaggcagagtttgcagtgagccgggatcacgccattgcactccagcctgagcaacagagcgagactccgtctcaaaaaataaaaattaaaataaaaaaatagagaatagagggagcccagcagggagaggaaagtagagaatccttcccatgcagcccccgtttacctctggggcagagagaggggaatcttctaaaggtggaagagtgtaatgctcagctacagataaatacgtgttgccctccttctgttcatctaggcatgctcaggatttcagattgagagagttgtaaatgcataactcctccatcattacagcatccagtggcccctccctcactccctgaccgaggccttccctgactagccccatataaatgagtcacctttcagccctccccgctgccccaccctgattgattgaatacttgattggttgattttagagaagaggcctcgctctgttatccaggttggagtgcagtggcgctatcatagctcactgcaacctctaactcctgggctcaagcgaccctcctactctgcctcccgagtagctgggactataggcatgcaccaccacacgaggtcaacttttctatacttcatagagacagggtcttgctatgttgcctaggctggtctcaaagcaatcaagcgatcctctcaccttggaggtgctgggattacaggcgtaagcccccacgccgggccccctgacttgttaattctctgtggcacatttccctcccgggcttggtgtatgcttacttgtcgatgtgtctgatgactgtctcctctcactagcgttgaagtgctgtgagaaccaggacataatcccactgcctggagcagtgcccgctgaccaagtgtctgctggatggatgaaagataatgaaggtcaccaatgggcaatttaagggacttccaagggcagttttcatcctacgagatctttgcctctggtgctgccttggaacccactgctttggagctagacggtgctgttgggatatttcccaggaggagacacccagcaaagcttctgatttgtccaccattccctttcttacgccaggtgaatacaacacacacaatggaccttccacaccagcgaaagagggagacacagacaggccgcaccgggcctccgacgggaagctccgaggccggtctaagaggagcagtgacccgtccccggcaggggacaatgagattgaggtaatccaaaggggctctgtgtgacctggtgaatgtaatctccatctgaggcccaaacaagagtggggacagagttttctccaagtacgaggcggagaatcgcccttcgtgttttacaaagcatgagcagggaagcatgaggttgtccaagcaggtagtcctggggccaggacagaagagaggttctcaaactgaagcagcatcagaatcacctggggggtgggggatggtgcttttgaaatcagggattgctgggcctcagcccaagagtttccaattcagcagatctggggcagggcatgagaatttacgtttctgacaagcccccagatgattatgatgctctggattgaggaccacactctgagagtccctgataaagaaaagaatgggcctccgaccttccagctgggttaaagtggttctctaccctggttacacagcagaatcatctgggatgctctttaaaaaacagataccctggccccatcccagatcaattgaaaagactcactggaggaactaggggggaggaggggagttttaaacattctcggtggggactctaataaggcttagatattgatctgtgtggaggctggctctaatgagtgtgcctctatttctgggattctgggattctgacttctcagaaaggggctctcaacctggactgcacacgacaatcacatgaggactttgagaaaccttcattatcaagttgcacctcagaccaattaaatcctattccctgagggtagaagctaggcatcagtgtttttaaagctccgtgggtgattcctgtgtgcagctcaggctgagaactagtggtcagggatgctccaatctttttttttttttttttttgaattggagcctctctctggctcccccatcacccaggctggagtgcagtggcacaatctcggctcaccgcaacctccacctcccaggttcaagcgattctcttgcctcggcctcctgaatagctgagattacaggtgcacgccaccatgctcagctaatttttgtatttttagtagagacgaggttttaccatgttggccaggctggtcttgaactcctgccctcaactgacctacccgccttggcctcccaaagtgctgagattacaggcgtgagccgccatgcccggacttttttttttttaatcaggtatacatgaggttttcaacaggttgctatgggatacatacagatagtaagatgataatcatcatgaaacagattaccaagtctaccatctcacaaagttactttttctgtctgacaaaagcagctaaaatctacttatttaacaaaaatccctaatacaatataactttgttaactctaattcttgtgttgcacattagatctctatacttgtcatttgttatgcaagtgtagtagtattggccaggtactgacattttcccaaaaacaaaacattatgcctaggggagggtaccagtagaaataggcaaaatggatgccccaaaaccggaagtaagctactgttgtcttatcaagggaggaaaatgagcaaactcaccggtttatacttctttgaaaaaggcagtcagttgctggcctgagtgtgctaggtgtctcggtaggattgtcagtgccaggcagttcaagtacaccagcgtcacatccctatttataatctgtatactttatgcggcagctgcaatgctcagccacaaactcaaacacactgagaaagatcacctttgtcatttccttaaaaagcaatgtaattttaaccctgagtccccatgccaccagatggtaagaaatttcatttcattattagggaccctccactcccaggattaaatgagaatccaggggtcaagtggtctcagaaaccagaccagcctctgacgtccagtgtggctgggtggcccctgccaccttcattgtcaaagcctgcagtcgtcactaaaagtccagccactctctggtgtttccatgctatacaatgggtatggaaatctttgttgagcctgagaaccttgaaatatttgctacaattctttggttgcaagcaacagaaaccagtaccgggcccagcacagtggctcacgcctataaccttaccactttcagaggccgaggtgggcagattgcttaagtccagtaatttgaaaccagcctgggcaacatggcaaaacaccatctctaccaaaaaaaaaaaaaaaaaaaaaagccagccatggtggcacacacctgtagtcccagctactcagggggctgaagtggaaggatcaattgagcccaggaggtagaggctgcgttgagccatgaccacaccactgcactccagcctgggcgacaaattgagaacctatctcaaaaaaaagaaaccagttctggttacttaagcaaaaatgaatttactaggaaaggacaatgagaggaggccgtaaaaccaagtttagaaagaaagtaacaaagacattgttgagaaatctaggaatgccagaaagcaaacattttagagtgcagtgtcctgtccttcggtgtccgattccaagaagacagtatcccagtggcctagcttgggtcttaccccttaattgacagccccaccaaaatagcacacaatggggaaggaaaactaggatgctcttttcagaagccctgaagttggaagctaggggtggggaccgggacctccaagcaacacatgctgacttcagcatgttcagggcatttgatatttagccagtggtccctagttcacctgtagcagttgtttatagctggggtcggttctgatcaccctggaagatattaaatatcctgaacatcatgcttggtgccctacacttggtcagcctcccgagatctaccagtagccttgatccatgctagagacctggtgcagagcaagtgttcccactgttcctggggccattcttagtccagggaattctgtccttgctttttgccttgttcttaaagctccatcctttccccaaatagaggagattttgcacaatcccttcagtgggtttaggcctttgcaaaagactgaaagaaaacgtattggcgtcaggttgtacttgctgtctgccttcccatattcctagaatctcctaccagcttgaagttgcagagcttcgaaaacacagagagccacacatacataatattccctccccacaagaaaattattcagtcacctaacatgttttctgctctctgtaggggaacggcgggggtagagagagatttttccattaaactgagaaagaggtggggagggttatggcatagaagtcagggattatagggtgatattattctggaaacatctgcttcttgatttcagcataagtaccactggcaagaaccattgaaaaggtgtgagctgtgtttcacttctatgcttaatgtcatcatagaaggtttgcttgggtcacacctcttaagtctttggctgttttgctaatgactgaagcccacgggagagaaattatgtggaagtggaaaggaggaaaattctgagcatgtattagttaaaatccttcagctgcacgtgccagggaccaacttgagctacttaggtgaaaaagcagaatttattttaaggatacagggcctctcttagaacttaaggacagaagtagagtagagtatcagcgaggcactggaaccagcaagggagacagggacaagaaactgcatgtatgccttctcttcccatttgccacagtgaagatgacagaactcccaaactatagtgtcctggccgtgccttcatgtgctagttactgggcacagctctcctctgggcctcctcactcctcctttccctctactcccaatgaaaccaggtcctggtaaagtgttagtttgtttgtatctttcaccttctgttcttgtctctggagactacctgtcagatcccggggtctgggtccagcccatgctgaagtccgaggggagtgggtggatgggcagaaagaacactcagggggccataggaggtgaaatgtagttttatttagcagctttctcatcagcagctttctcacattagctgtctcacattgtccacctttatctcggctgtctgcttcagctctgcggctcctgctgccctgacagctgcagccgcgcagccggctctcccttgccttcagggtcagcagcttaactcttcccctctctgggcaccagcgcaagctgtgctgtggctcccctctgtctatctgcaaaacagtcattctcccttacaggggcctgtagcttcattccctctctgggcaccagcgcctgcacaagagccacattgagccaaactgagccaagagccatgccctgtgcacagcgtcagcagggcaattatatcttctaaagacagtagtgactgcaagccaagtatgaactacacaaacaggttatataacaagtggaggtatgcacctgcacgccaaactcgctgagtcacgcaggcctgggtatccatctcagcctagtccttgaccaaagcacatccatgtgccttacgctgcccttgtctccccttcagatcacatggctaaacttggccaccaatagccctccccaaaagacaattactttcttcctagccccaattttaaattgcaaaataaaaggtctctgacccacccatggttaaggacgcaccctggtctgcaccatgatggcctagggaatagggtcacctgcagaatggccaccaggaacttacccactaagaatcgaggatggtgaggtagtaggagaaagggatggatttttttcagaggggatttaatggataaagtaagggagcctgcactaaatttgaaaatatttgctgatttttaaaagttctattactgaaatttctaaatttaatttcctaagttcaaccccagtgaattcagataagttaggacttggcatatttgaatctcagaaggtccttctcaaacactgattttcaaacatttttaccatgacccgtaataagaaatatacttactatgatggcccagcatatatatgcacataaatataactggtccaaaagatttatgaaataatacttagccttactaattgcttcagaaatccctgtactagagaatctgggatgctaatacctttttcattctagatatttctcttaactttcaaaggcatggcaaatgccattgtgttaatacagccattgacctccagagagttttaaaaggtggcccactcaagattgcatactggggagggacatttgcctccccttctcaacactagctacagagttagtcaggtcctttgtccttgaaaataatgatcaccagaaaaataaagaaaatcaacagtatgaaaaataaagaacaagattagccaggcgtagtggctcaccatgccagcactgtgggaggccaagtggggaggattgcttgcattcaggagttcaagaacagcctgggcaacatagcgagaccctgtctctacaaaaagaaagatcaaaaattagccaggcatggtgccacatgcctgtagtcccactactcaggaggctgaggtgggaggatcgcttgagcctggagaggtctaggctgcagtgagtgatgattacgccactgcacacaggccctgtctcaaaaaaaatttttttaattaaaaacaataaaggccaaggtaaataaatgggataagttagaagtgaagtaatttaagaaacataaaataacttaggaaaattctaattggttttcatataaaaactcaagatcttgcatccataaaataaaaagtggaggctactgggaaaggaatactcagagggaaaaaaagttattggaaatcttttaattactgcaaaaatcaaaaatttaataagggttataagagaaagtttaagaaatctcccagaacacagatcaaaaagacagatttattaaaaaatattatttacaaggaaaggcagtatcaacccaaaaggtttgatttgactattgggaatttcacaaaaagaaaacagtagaaaagatgggagaaaattattaaaagaaataagaaaataaaaattttcagatctgtagaaagatgcaagtcattgggttgaaaatgctgaagtgccaaacagaattcattaaaaagaagaccatacccagatatatcttcatggaatttgaggataccaagtgtaaagaaaagatcctttaaaattctagaaagaaaaaaaaggtaaaacctacaaggactgaggaacagtgaaataccagatttctcatcagtgaccctggacacttaaaaaaaatgatgaaagaattctttcaaagatctagaggatattgttttcaaattggaattctgtacccagagaaactatagagaaaaataaagataacttcagatattcgagaattcaggaagattactttccatgtaccatttcaggaaaagcaacttaaggatgtattcaagcaaaacaaggaagaaaaccaaggaagagagacttgggatccagaaaacagtggatccaacccagaaatacaatgaagggaagtctgcagcaagcctaaaaatgatccagtccacattggaggtttctatcactgaggatagatatctccaatacagagtgtgtggctgaatttgacattttaatgaaggtacattgttgcaaacaagaaaaaattaataaattctgacaaaaccaaaaaagttacatcagacaggtatgatacatatatgaacaaactgagatatgacattattttaattatgatggagtacaagtaaagagaatacatacaatggtaggggcattctccttaaaatcaatctggggatatgacattggacacatagagaagacaatgcaatcttagcatattacttggctctgtagtgaacaataatcacaaaatgtaaatgtatattactagttaccaacttttaaaattgacataggcagagtgcagaaaatttaaccttagttataaaaccaatgtacaaacaagtttatcctcattgacaatatgaaggtaaagctacagctgatagacattagagcggggaggatgtatgggaaaaggtagggactcccatatcgatagctccatgtttgtttacctttttagccaagggagaatgtccaaggagaattggaatagagggactcacatatgagaaaaatgtaagtttccagagaaacaacagagatttccatgagttaaaccctcatcttttaagactgcccagtcaaaagatattgtctcaagttgaaaaatcagtaagggtataaatatgttacttagaattatagaggtgatcaccagacttgctaaaaacagaaatagttgagcgtatggtgaacagtgaatttaaaatggtggtatttcattttgtaaaacgagttatatgattttcgttgttgattttggcctgaatcctcctttttgagcttttatatggaaggcaaggacagacttcttgattctgacatcttttgagttgataagagcccaaaaactgggcatccgaatacacatgacacagataaggttggatggggattcatgacacatcagtgagttacatgttttgtaactaaagataatgtttttcgagacttcttttcctccaagggaatgaatttctgcagacattaagtcagatgcacgtgagtccatttttctccattctcttcctctctttcatcacagcgtgtgttcgtgtgggacttggatgagacaataattatttttcactccttactcacggggacatttgcatccagatacgggaaggtaagaatccattttgtctctctctctctttttttgttttcaacgttattgtccagccagtttgtcctggaaattgtgcggacagtttatgaggcagcttctccaacaaaagctgccctttggggtcagcccaggtttaaaaattcctatgacattttcctttgccatgtgaaaatttaattagcttccccttctattgtcttccatgccttttcttccaacgtttgaagcaatcaacatttacttgataggaaatacacttgttgtcttcagccgtctcccttcctaagacagtgggctatggtgcagccaaagccagtaattctagctagaaaacgaggtaaagtacttttcttcttccctgttgtttatcctagtgtctccggcagatgaatttaattttccttctgtttttttgagacaagggggaggcattgtcagctccagtgtggatcttagcaatcgttttgcaaatgtatcatcaacaaattatgtcggggaaccatctagttagaattctaggcaaatgctattggctgaatcgtggtggatggaagagaccttgaaaccactttaataatgcaaaaatgaactcaactgctaaaactcaaaccttgtcaattatttgggttcatcccatgggctactgaacagacgacgagtggatgccctagacatctgtcatctcttcaggggcacgcatggggtggaagggcagtacttaagacgacagcctagttttcatctcctcagaggtgagtgacccactggcagctgcttccacgcatgggtaggaaccttgagacttgccagcgcctggaaaatatttctgtttctgtttagagaccaggaatatgatttgacatcacttcatggcttttccagctgctcatgttttttatgggggttataacaagctggatgtgtaattagcaagatagatttatcgtctgccattatgttgtaaagaatataaaaatggtgttggtggtgcagaaatctcttgccgtgtaggaatgccgttaatatgtctagcagtgcctgtgggaaatccagcatgcatttttggactgtgcacagcttaggtaaaagatggcagagtcaagagctgctgaaaacactgaagaatgggctccacagccattgcaaaaatttgggctatcccaaaggggccacagtagtaagttgcctgctaagtcgtggtgttttatggttttcctaaccactcctgtaaagtcacctcccctgagacacaggcactcactcatcttgcccttagaggcagcctgctgtgaagttccatagctccgtgcaacaactcacttagtatggattgtgtagggatgtgtgatcttgggtatgatttttgtatctgtgtctcaccaacattcctcaaaccaaactgtgggctccttcaagtcagagacaaagccccgagttcctttctgggccccatgtcccctggcccatgccattcctcactgccagccacctctctcccacctcaccacccaattccagccaccttcacctccaactcggcttcctatctggtctcccagcttctactcttgcccactgcagccccctacattggagtcatcctgaaatgcaagcttggccatatcactctccagccgaaaaatcttcagtggcttccccattgacaagcctacccccagcctccaaggctcttcatgagtagcctcctgccccattctccagcctcctttcctgctcttaccctgagttgtttttggtccttgaacctgccacattctctcccatcgctgctgggtttctcccagaagatcctgagacaaagagtgagtgcgagtaatctatctgggaggtaatcccaggaagtagtggggaattcaggcaaggagggaaaggaagccaatacaaattacacaaatataatagttactgccgtgggcagttggggctaagtcccaccagggacagtgttaacccacccaaggagtgagggagctgggatatttacctgcaaattcccttccattaagcgttgaaggcttttcctggaaattgtctccttgcacttctggcctgtccccaagaagccgcagagggcagccttggtggctgacacctataatcctagcacttcgggaggccgaagtgagaggattgcttgaggccagcctgggcaacatagtgagaccccatctctttaaaaaacttaaaaattagcctggtgtgatagtgtgtacctttggtcccagctactcaggaagctgagaagggaggatcgcttgagcctgtggtgagctatgatcgcaccactgcactctagcctgggcaacagagcaagaccctgtctcaatcaatcactcaatcaataaaaagagagccccagggtagagcatcacaaatgctaactgtggaaggtttcttcatatatgtacaggaatggtgacagttgaggggacgtggagctggggcacactggaagcctctgctataatctaagatgttctagaatgttcttttattaagttaaatcctacttatctttcagttctcatttaaaacgtagcttcctccaaaaggactttcctcagtactcctctccatctaaattgcgtctgtcctcataactgtgttttccattcatgtcataattatgtttatttttattttatgtcttccttctaggctataagcaccataagggcagagaccatgaacatttttttttatttccccaaccacgcgcagtacacagggcagaattgctcaataaatatttgttgaatgaatgaatcagggtgatcccctagaatgttaagctgcacgaggacagggacctttggtttggtttggtttggtttggtttggtttggttttgttcatagctttatcaccagtgcatggaacagtgtctcccacttagtaggtgtcaagtaaatatttgttaaatgaaggaaggaaggaaggaaaatagtatcaaaacagaaatttttaactggtggccgctggccaaattcatactgcagatatttctctttggcccccagagtgtttgaaaaaatgtgaatgtgtcgccaacatttaaaaatcaggagattgcacagaccaaaacaatctagatttccagctcttcttgaaaaattagaaatctggcaatcctgcattcccctggggccacaatcaacaggagcagaggaggactgccctcttagggggggtggacattctccagcccatcgcagcccccacctggcctggttaacccattcttgggactctctggccccattggtatctgagtttcaacatccatcctagaattacagaatcatagaagattagagctggaaggacttgagagatcatcatgtccagttagtctccatcgtccataaggagaaactgaggctcagagggagtaagatcatccaagaaagcatgagaatcagactcaagctcacctgccttcctgtgtgatctctggatgtccagggaaaactgaggtgaaaagctgttagagcacccagatcgcctgtgccatcttcatgactctcctagaattttccattccctcctccagctctcgctaaggtgaggaatgaatgagtattatcatttgctaaatctagcaaccttcagagagacccaaaataattgtgacttaaacaagatgcaagtttatttcactcccctgcagtccagatggaagcagttcaagctggggaaactgctgtgcagcaccagagaccacagcctctacagtcttattccctgccattttttggagtgtcaccagcattggcaagataaatcatagcttacccccatgtctgcattccagccagtaagcaagaataggaaaagggggacttgcccctctcttttgatatttttattttcttgtccctctttttttattatttttattaatttttttagagacagggtcttgctctgctgcccaggctggagtgcagtagcacaatcatagctcactgtaacctcaaactcctcactcaagcaagcctcccacctgagcttcctgagtagctgggacaacaggcaagtgccaccatgcccagctaatttttaaaagttttttgtagagatgggatctcactgtgttgcccaggctggtctcgaactcttgggctcaagtgattctcccacctcggcctcccaaagttctgggattacaggcctgagccaccacacccagcaagccccacttttttaaaggccagactcagaagttgcaggcatcacttctgctcttatcctattgggcagaacttggtcagatggcctcatctacctgcaagggagtctgtgaaatgtactctttatttgaggctgtcatggccagttaaaatttagatattctattactctgagagggagaaaagaagaatgggtattagaggacaactagcaatttctagcccaaagtactgtatagtaaaaggaaaaacaattaaatagaaaactgatgaggaaacataaaattagttatgtttgagaggcctgagggacaacaggatttgtaggtctgaagctccagagagaggtctgcactatagctctaagcttggatgtcagagaagtaataaggatgtagaggagaagtgtgagccccattttgcagacagagtgactgagatgagacctacagaagttgtgtagttggtgggatattcatgacagaaccaaaactcatggcctcagcttctggctcacagttctttctctctgtacttccccagcactgcagccatgtgaaacttgttattaatagctgtcatcaagtatgacattcagtttgaagtacagcatatttaagctgcaaagaaaatttattgaagcacaataattgaaaaacccagggatacctgggattcaggtctggctggatccagatgtttaagcaatgttcttaggtcattctgtatctcttagccaattttctccatgtggtaactccctctcagcaatcccaactaaaaactggaaatttctagtacccacattccagcacaacttctaggcgttaatgccaatgtcccaaactgggtcacatgcccatccatatgccaacctctgtagctctgattggccagccaaatcaagagcccactcctggcatgggaaaggaggggcagatcagctccacctcaaccaaatagagtgagagagggaggatggtcccccaaaggaaactggagtaatccttccagaagagtatgaaggcccatggatgtccagtgaatgggcactggatgccaagatcccctgaacatccatgacaagaaccagcagcactttgcttgtggccatcatgctgcataccatgcaggaagccaaaatcattaatagtaccagccagagtggggacttgctgttttttgggggaactaagcccaacaaagctaaaatgattggggaatgattcaaaataggttgtttgaattttaagacagaaactgggctcccgttctgttcccaatcaagggatgtgctgcttgaggctgtcatctcttcacttcctttccatttcttcctccccagtgctcagagccagaacatccctttggtagctgtatctcccagcatcttgtggatccattagaaattccctagagagctggagcagccagtgactgctgcctctttcctaacccctcccttcccctaccaccctcctccgcagtctctgaactctgtttttttccagctggtattaggcaaatgcaaggtggtcaagagcctttgcctgtggccaggaagggattctaaaagaaattagtcagctttcctccagggattcatggggagttgccctgactcctccttttgtgccttgccttctaggcagcccactaccaatatgaagctcaactccaggacctgttgttgttgttgttgttaataacaattttattgagatacaatctacatatcataatttaccctttcgatgtgtacaattcagtaatttttagtatattcacagagttgtacaaccatcaccactctaattttagaatattttcatcaccccaaaaagaaaccctatactcactagcagtcacccctgccatttccttctccccctggcccctgacaaccactaatctactttctttctctacagatttgcctcttctggatatttcatataaagggaatcacacagtacgtgtgatcatccgtgttgtagcatgtatcagtactccattcctttttatggccacataattttccattgtgtattagtccattttcacatggctataaacaaatattcaagactgggtaatttataaaggaaataggttaaatcatctcacagttctgcgtggctggagaggcctcaggaaagttaacgaacatggcagaagaggaagcaaacacttccttcttcacaaggcagtaggagagagaaagttcagagtgtagggggaagagccccttgtaaaacgatcagacatagtgacaacccacccacccaccacaagaacagcatgggggaaaccacccctatgatccaatcacctcccacgaggttcctccaccaacacaaggggattacaatttggattatgattcaagatgagatttgggtggggacacagagccagaccatatcacagttcatggataaactatattttgtctatccatttatcagttggatagttgaagtttgggccattatgaataatgctgctatgaacattggcatacaagtatttgcatgtgcatatgtttttaattctcttaggtatatgcctaggagtagaattgctgggccacatggtaactctaggtttaatgcttttgaggaacagccagattattttccaaagtgactgtatcattttaccttcccatcagccatgtaaaatggctccaatttctccacatcctcatcaatatgttattgtctgcctttttggctatagtcctagtaagtatgaagtggtatctcattgtgggtttgattggcatttccctaataatgttgacaagtgactagtgatgtttttatgtgcttattggccatttgtatatcttctttggaaaaatatttattcaaatcttttgctcatttttaattggtttgtctttatatcattataagagtttttatatatctggataccagtctattatcagatatgtgatttgcaaatattttctctctcattctgtgagttgtctttccattttctttgtggtatcctttgaaataccaagctttttatttttatgaagtgcaatttatgtatattttctttggttacttttgcttttggtgtcatatctgagaccctattgcctaacctaggtcacagagatttactcctgcacttttttctaagaattttctcattttagctcttacatttaggtctgtgatccattttgagttaatttgtgtgtatgatgtgaggcaggggtgcaacctcattgttttacctatgactatcaagtcgtcccagtagcatttgttgaaaagactcttctttcccctactgaattgtctcaacatcctgtcagaaaatcaattggcagccaggtgcagtggctcacacctgtaatctcagcactctgggaggtccaggcaggtggattacatgaggccaggagttcaagaccagcctggccaacatggtgaaactccatctctactaaaaatacaaaaattagccagatgagatggtgcacgtctgtaatcccagctacttgggaggcttaggcatgagaattccttgaacccgggaggtggaggctgcagtgaaccaagatcatgccattgcactccagcctgggcgacagagccagactctatctcaaaaatttttttaaaaaatcaattggccgtaaatatgtttatttcttgactcttcattttatcccatagatctgtatgtatgcccttatgccagtaccacactgtcttgattactgtagctttgtagtaagtttcaaaaatggaaagtaggagtcctccacctttgttcttatgaccagtcttgacctttataattggcatctccattggttttattttttgtggttttaacatagcctttgcacttgctgttgttccctgtgccaggaatgcccatctccccattttctacatggctcctttattcacgaatctgcccagtggctgggcgtggtggcccatgcctgtaatcccagcactttgggaagctgaggcaggcagatcacttgaggccaggagttcgaaaccagcctgtccaacatgatgaaaccctgtctctactaaaaacacaaaaattagctgggcatgatggcaggcacctgtaatcccagctactcaggaggctgagacaggagaatcacttgaacctgggaggcggaggttgcaatgagctgagatcacgccactgaactccagcctgggcgacagagcaagactctgtcccaaaaaaaaaaaaaaaaggaacctgcccaaatgtttcctcatcaaaccacctgatgcgttaaatatgtattatttattacctgccctctccaacacacacacatttgaatgtaaactctatgaaaacaagcaccagggccaggattagccttttgtaggcacaaaatttaagtgggtactgagaaacagagtaatcaagctcaatcatattttaatgcaatattttacaaatcaaaattgatgccaaaaaatcgatcatgaaagaaaatcaaaatgtaaacaaagacagatggttgtgtgtgttactgccctgcgttattgtgcaatgggaacagtttccaatcagcccctgactccctggcctgagtgactgttacctctccacagggcaggtttatgagccttggcaatggcaggaacagattggccaacgagaggctttaatatatagtcatcttttgtgttttgttttttgtttttgtttttgttttttactgtagagcttttattaactttttccacttgagtcaaaatacagaaaaatgttttgataagtgtatgtaggggccacatttttcctcttgcctcaggccctgtggcttggcctggaatggcaagcaccagggtggtctgcctcccagctgtagcccccggacctagcacagggcctggcacatggtaggagctcagtaaacgtttgttgattacatgactgtaatcaagggagtattttaagtgttagtagcagggagagatctcaacccacacagcatgcatgaaatagaattttggttttctgtaacgcaatggaattcctacttgcagcctttgttctgctgggttctttttccttcctcaccaggttatatcagacttccagggagctcacaaagcacccagggattgggtgagagtccatggacccacgagtcctctgtccacttacgacactgctgacatgtatctggttcctgtccctaggggtgcttcaggtctggtgggatctggaatctcagtgaggctggctatggtcctatctgcctgaccccctagcccagactgtcactctcttaggttttgcttcctggcacacgtggcagggtagggaggcctctgaaaacccccttccatccttcagttgttggaagtcaggacaagaaaccagtgccactcgctcagcatcccaaggccaaaaagctcaaaatctgctaccttatgaatgggaggctggaaaacagggaactgagggagcagagagtaacaactcacatctcgcccatgttcttgttggcggatacatcagatccttgagggagcgaactggagtagaagggagtgtttggaaaagggaggaatttgcagttgtcacggtgatgggaggcacaacaaacccgtgaatcaacccaccaagataccattagtggtctccatagaaatgtgtgcattttctcattttattcaacaaatatttatcaagtgcctcctgcatgccaggtgtactgttctaggccctggggatgcggcagggaacaaagtccattaaaaactctgccctcatggagctgatatccttggggagaggaaggaagatgataagcaagacacatagaaatgcaagtggccaggcacagtgacacacgcctgtaatcccagcactttgggaggctgaggcaagtggatgacttgaggccaggagttcgagaccagcctgcccgttatggtgaaaccccatctctactaaaaatacaaaaattagccaggcgtggtggtgggcacctgtagtcccagctatctgggaggcttgaggcatgagagttacttaaacccaggtggcagaggttgcagtgagcctagatcatgccactgtactccagcctagacaacagagtgagactctgtatcaaaaaaaaaaaaaaaagaaagaaagaaatgcaaggccaggcatggtggtgtacccctgtaatcccagcactttgggaggttgaggcaggaggattgcttgaggccagaagttcaagaccagcctggacaacatgagaccctgtctctaaaacaagaaagagagaaagaaaaaacaaaagagaagaaggaagaagaagaagaagaaaagaaaaagaagaagagagaaggaaaaaggagaagaaagaagaagtaggaagaggaagaggaagaaggaagggaagggaaggggaaagaagaagaaataagaagaaataataatccagagaaaaagagaagttgaaattaaatttgagaaaaatgtggccagggaaggaggccacacagagaagctaaattttgaataaggcctgaaggaagtggaggaacagaaatctggtggaagggcagagggaatggcacatgcaaaggccctgcagcagaagtgtgcctggggagtttgagggacagcaaggaggccagtgtggctggagcacagcagactgactcttaagttggagctggtagagatttggagtagaaggacagagtctgccctggtttcagtatggtttgttgagccccacaaagtctcatgttgaaatttcatccccattgttgaaggtggggcctaaagggaggtgtttggatcctggaggtggatccctcattaatggcttggtgccattcttgcaggagtgagtgagttctcttagttcccgtgagaactcgttgttgaaaagagcctggcagctccctccactctctctcttcctctctctccacatgtgatctgcacatgctggctcccctttgctttccaccatgagtggaagcagcctgaggcctcaccagatgcagatgctgttgccatgcttcttgtacagcctgccgaactgtgagccaaataaacctcttttctttatcaattccctagcctcagatattcctttatagcaacacaaatggatgaagatggaatctgagttccattcttatttatctttattttttatttatttattttagagacagggtcttgctctgtcacccaggctggagtgcagtggcatgatcatagttcactgcaacctcaacctcctgggctcaagcagtcctctcacctcagcctcccaagtagctgagactacaggtgcacaccactgtgcccagctaattttttttgagagacgagggtctcagtggctggtctctactcctgggctcaagcgatcctcccccctcagctttccaaggtgctgggattacaggcgtgagctactgcatccagcctgagctccattcttaaggagcccctctggctctccccggggagaggagagtagaaagtggccaggttggaatcctggcgatgggtgaggaggctactgcaccagtttatctgaaagactgaactggtctttctcagtttaccgttctctccacccagggagtggagatgcaggcggggaggagcacagtaggctgggtatattttgaaggcagaccagccacagataaagaaggtaaagggagtcctaattctcaccaccaagctgcaaagatgccctgttttccatccagggtctccccctgaagagacctgattgcttctacccctgttggcaaccagccaattcctcctgaacaaattcctcaagctttactgcacatttcctatacaccaagcactcactatcaattttattattttcttaagttaagcctcaaaggcacagcttgagttattcatattctttgtccacacaaggcccctttcttgtttcacgtaggtactaccaatgtgtttccttttaaacctatttgtgctcctttccctcccctccctatatagctcagtgtatagccttttgtttgtttcctgtaacatatacattctctttttgtgtgcatttatttcttatgtgtataggtgacattgtttaaataccctgtgtttcttacctttctccctctgtgctatggtttcacttatttatttctgagacaggggtctcgtcatgttgcccacgctagtctcgaactccagggctctagtaatcctcctgcctcagcctcccaaagtgctgggattacaagcatgaggcaccacaccctgcctgcactatggttttagatcctcccacattgccatacatacaactctatcactctaacacaatagtttttaaccagaggaagttttggcccccaggggacatttgacattccccatttttggggaatgggatactactggcatctagtgggtagaagccagggatgctgctacacatcccacaatgcacaggatggccccacaataaaggatgattgggccctccgggtccatagtgctgtggctgggggcctgcatctgaccgctgcatagtcccaggtcctccaggtcttccttatggcactctcttcagggaggacactcaggcttcctcagctccgcatcagcacagacagagctgtgacgagcaacctttatggactgctctgagctttacaccctctctctcatttaatccccaccatgaatctataaggcccagctgctccctttatactcatttccagagaaactgaggcccagagaggtgatgtgacttagtcaaggtcacccagcttaggagggatgaaagccaggaagtggcccactgctctttaatttattttttattttatttttctgcgacagggtctcactctgtcactcgctgaagcacagtggtgcaaacacggctcactgcagcctcaacttcctgggatcaagcaatcctctcagctcagcctcttgtgtagctgggaccacagacatgcactaccatgcccagctaattttttatgtttttttgtgagacagggatctcactttccccaggctggtctcgaactcctgggcttaaatcccaaagtgctgtgattacaggcgtgagccaccatgtccggccgctccactgctcttaaccacgtaacatgtccctagtgatccatgtgactgtctcgagggtaaaaattaaaagcctctggaatgaactcttctgctgcctcttagctcgtggagcacagggactgggtctgatgtgttcacagctttatcccaatacccagcacagtacctggcacctccactggacaaatatttgttgaataaacaaataaacaaagggctgccaggtagggagttttcacttgtgtgatggcaaatacagcagaaataagattccagggcattcacccacaagggagcagacagccacgtgtgtgacaagcaggggcctggcagcctctgtctcagactgagatgctccatgccccctagcctggcctcacctagagcctggcccacagcagggtctcagcaaaggcttcacaattttgttttcagacattgcatccatcccctccttcctgaaaatgtctttgttctactgtccttcatggcagtttggctgggtatagaatttttgtttggaaataataattttccttcatagttttaaggcattttcccattgactctggcttccagagaataaatgacaggtgcagttggtcctaattgaagtaggtcagaaggtgctgagaaagacatcttgaagaagtgaaattggtaaaatacctggtacatctgaatgcattgagaggatttttaaaagatcattatttactccaacggaaaacaaaaggcatgagaagtgatcatagtttactacctggcttagctgtgttatcagttagctacaaaacaatcaccccaggacttagtggcataaaacaataagcatttattattcagcccatgagattttgagttggcagagaggttctactgagctagactgggctcttgcatgtgtctgcagggtcagctggcagatcagctggtagagaatggcctgagctgggacaacctgtctctgctccatggggtctctcatcctccagcaggcaagtccaggcttttcctcgtggcctaagaagtgttcctttcaaggagagagacccgtctttagtcctccatttggaactggcgtgccatttggaactggcacactgtgaaaagtgggcagcactgtaccctggggcttagaaacgagcccagatcatttctgctgcattctgtcagcaaaagtaaacataagccagcccagatttaaacagagcagtaaccccacctcttgaagggagaagctttactatcacacttcagagggtgaagatgtaaggacattgagtcatcaaggcagtcagcctatgcagtaatcacagcagcgtgaactctgactagtagcccaataaaaaccattcacttttgagaagccgaggtgggcagatcacttgagcccaggagtttgagactagcctgggcaaaacagcaaaatcccatctgtacaaaaaaaaatttttttttcaaaaaattagccaggcgtggtggtgtgcacctgtagtcctagctactccggaggctgaggttgaaggatcccttgagcccaggagttagaggctgcagtgagccgaggtggcaccactgcactccagtttggccaacagagcaagaccgctgtctcaagcaaacaaacaaagccatgactatttaggaggaaaagagaatgagaaggatacatatgtgcggtaaaggtagcaagaagaaaatccacattgcccatagtgggatcaaataatgcctcaaagtgaaaaatcaaaaagccatgtaattataaccatgcaatttagagacagggcagtgagtatcaagataatgaatgaaggaaagagttgaaggtggtgacaaagggggcatgagagggtgtgtcagggaaactgcagtcttataacaagccttgtggaactttttgagcatttgacaaaaattaaaactattaaaaattaaatgatttaacttgattatattatgcatataaaagaatgagttatgcaagactatatctgatcagctccttgctgagaggagagattaggcatagattggagaaagaaggtatctgcatggctcagatagtcaaggaagacttcctgtaaaaggaagtatcagctgagacttcaaaactaggccaaaaaaaaagcacttaggcacgtttgggagtttacagttcattcttacattatttgtcttaattccacaaccaccttcttgaggtgaataaatcaggaattattgttactcttcttattttgcaaaagagaaaacagttccagggaagttgagggacttgcctgaggctccagaagcagggaatggctccaaaagttagatttcatgttcactcctttttttttttttttttttttttttttgagacggagtcttattctgtcacccgggctggagtgcagtggtgatgtcttggctcactgcaaccactgcctcccaggttcaagcgatcctcctgcctcagcctccctagtagctgggattataagcatgcaccaccacgcccggctaatttttgtatttttagtagaggtgggggtttcaccatgttgaccgggctggtcttgaacccccgacctcaagtgatacgcccacctcagcctccccaagtgctgggattacaggtgtgagccaccgcaactggcagattttacgtccaaatgcaacaaaggctagctgtggctaacttaaccacaaggaaattgattgggagggtatgagggagttttcaggatccaggagaagaatggaggaaaagttggggctcccaaggagcaggagtgatgaggtggcacctttaggccttacagctgctgtttcatccttgaattgcttcagtcccaggagagaggggctgatcggctgtgcctgggacctgtgcccacctctcagctaagcagggttagacaccttgatggacagcccaccaagccacctgcagtgggggcaggcagttccccatgaggaacctaaggagcttttagcagaaagaatgagaatggatgagaggcagaaaccatgggtgctcatgccaggagcagagccagcctccacatccacactcggggctgtctgctctgaaaggtgggtagcgctgtagcctggagcttagaaacgaacctcagatcacacactttgtattcacccactgcaaaggtcattcccaggctgagatttctccagagagagaaatgcccagcatctgccaccagcacacccctccttaagggaaacccactctcctgagacacacagaccataatgtttctgcttttcagagtgaatcactgcctcagacacagctgagcccacatcaaattcctagatgggttttttttttttgtggatatgctgtggtttcaagggggagatctccactgtgcttctggggtttcttatttaaatggaactaggtgtcattcaaagtagcagtggctgggatcaccacatgttccctgacttgcctttttagtgaccatccacacagatatctgtttgttccatgactcttggactcatgagtcagctcttctgtcgggggagaatgggcagaactcacaggcagcctcaaaggctctgtataagacacctgttggtgtgatggctacagaaacacaccatcctctcatccctgggggcagggcaggtgaatgcccatgtcacagatgagaaccctgaggctcacctcgctgaagtgcctgcactaaaagcctctggaaaaggtctttcacacagggttttctgtccccctttaagggtgacgtttttagcctttcctcttcagaaggcatgaaaagcttcagccttggccggccacggtggctcatgcctgtaatcccagcacttgggaagctgaggctggtggatcacctgaggtcaggagttcgagaccagcctggccgacatggtgaaaccccgtctctactaaaaatacaaaaattagccgagagtggtggtgtgcgcctgtaatcccagctactcaggaggctgaggcaaaagaatcacttgaacccaggagatggatattgtagtgagccgaaatcgtgccattgcactccagcctgggccacaagagcaagactccttcaaataataataataataataaagctttggcctctatcaaagacactgagagagtttggatatttgatccctgccccagtctcatgttaaattataatccccagtgctagaagtggggcctggtgggaggtgttgggatcatgggtgcggatccctcatggcttgtgaggatcccacatggcttcacaatagtgagttcttgtgagatctggtcatttaaaagtgtgtggcacttctccgccactctccccctcttgctcctgcttttgccaggtgaagtacctgctcccacttggccttctgccatgaataaaagctccctgaggcctccccagaagctcagcagttgcctgtgctgtgcttatacagcctgcagaactgtgagccaattaaacctcttttctttatagattaccctggctcagatatttctttatagcaatgcaagaatggactcacaaagatactttcgggcatgccgaggcaagcagctgaagggtcttcatagccaaatttgctcacaggtggggcctcctgcccacctcccaactgcccaccaccttacccttctcccacctgccagagggattgcttgaaaatgcaaatcaggccctgcaatgaccccctcttgctgccagggaagcagactgctcccaaggaccccctgcccagctcatcgctgccgtcttcagccgtcttccctggccatacaggtgcctttgctcacccagggcatcaaattcccaactgtctgggcctctgcgtatgctattctgaattcttagaatattcttcatccttcttttttactcctgttattcactgggaggctcagcttttctttcataacacagttcagaagttacttcctcgagggtcccccagagtaagtcaggtcacccgtcttatgctcacgtaactctcttaactgacccatacgccaaccatcatcattgctgtgtctgtctcttgaatcccatccccttctctccagctcccccaccacctccttcatttcagcctcctccgccctctccacgggtctggacagctgcctccctgcttcccctctgcctccaccaccctcagcctattgggcagccaaacaactgcttcaagaggcaaatgggattgtgccaccttctccatcctcacccggtggagaaccctgcagtgatgctcactgcccttaaggcaaactctttgccatgactttccaggccccgggcggtccagcccctgccaaccttgccaactttcaccttgatctctttcacccacccccagcactgctgcagcctcctgctcacatgcacttcccaccacagggcctttgcacacactgttgctctgcccagaacactcttcctaccctcccttagtctaaccagtgttgcctgtccagtgtggtatccttagggacgcttcccaatctttccaagttggttaaaaacctcctactgatggttcatagcaccacagtgctcatagtagcacagttgcaattatttatttctgggtgtgattatttgattatagaataacatcatcatccttcttttttttttttttttttttttttgagatggagtttcgctcttattgcccaggctggagtgcagtggtgcaatcttggctcactgcaacctccgcctggctagttcaagcgattctcctgcctcagcctctcgagtagctgggatgacaggcgcctgccaatacgcctagctaatttttgtatttttagtagagactgggtttcaccatgttggccaggctggtctcgaactcctgacctcaggtgatccacccacctcagcctcccaaagtgctgggatcataggcatgagccactgcgcccggcccaccatccttcttaaaaggctggaattgaaacctcattataacagattctgtcaatctcccctcccccattattcccgtagcactctgctcctttgggtgtgacgatgtccctctgcaggcacctgtgaccctctgcagtgcgttgggcagtgtcccagagggacagagccccagtggcccaggcattgacctgctcattgacccacccttccttcccctccactctcacgctcccactgtgtcaacagcccttcctgagatcacctcccagaaaaaccacctgcatgtgaatctttggctctgggtcagcatcctgggagacccaaactaagacatcgaggatgtatgaatgctgggactccatgattgctgctgcagggatggaaactcctcttagtagagccctgctgtgacataagtctcctggctactgaagggcggtctggcatcaccaggtagctggcagaaatgcagagtctcagaccccgctgtagactcactgaacatgcatctgcattttttttttttttttttttgaggcagagtcttgctctgtcacccagacttcagtgcggtagtgcagtggtgtagtggtgcgatctcggctcactgcaacctctgccccctgggttcaagccattctcctgcctcagcctccccagtagctgggaccacaggcgcacgccaccacacccagctaatttttgtatttttagtaaagacggggtttcacgatggccaggctggtctcgaactcctggcctcaaatgatccgcccgcctgggccttccaaagtgctggggttacaggcatgagccaccgcacccagccaagcatctgcatttaactccatccccaggccatcctttcacacattcatctgtgaggtgagatggagccccgaattcacctggtgttggcttttcttgcagatccagaggccaggtcgagagagcatgacctgatctccacagctcctcgaccggctcctctgccctctccgttccaccacagtcctccccgattcctccgcgggtgttattacgtgattccggcttggattccggaatccagaacccagcacaggactgtagggattcaatcagatccagttggcgataggcggcttggcctgtctgttactgctttacaaactgagaagaaataaaaagaaaaagaaaaagaaaacccggttttatgacgcagcagttaaaaactatttgtagaagttgctaaggttcaaatcaaaagtgccctctctcgaggactattagttaattcagaggaccacagattctttccttttcttccttttcccccttctaccttgaaatgtagctgtaattcatttctgccgttcatacagctagagctttccatcctgtgacaaacacaagccaaagtgcttaaggacatctgtttattttatttctttaacgagaaaaccttccaatttctcctgagctcagctgtgtttatttacattttcttggtcatgtgaggcgagcaccttggaagtttaaaggcctggccagacccttgcaggagcctgtagctctgaaacggagaggaagccctgcccaaggaaaacagagtccttggaactctataaaatagattctcaaaataaatactgcctcattcacttggtagatgtggattaagtcaagatgaatacaatttgaaaaggattttctgaggaagtcggagatttctttcccccactgggggttaaaccttgtatttaaatctctcttcccccttccctctctcttttcagctgagtaaaaggtgtttagtctttgtggctaataaagaaaggatgactttgattgggcttctccagcagtgattattttctttgcagcacggctgggagaaggagagtgacctcactagtcactctgtcccatcctgtaaggagtgagggcaagaagcaaacatctgcagttgtcattttggcgggggtgggtgaggaagaagttggaacagccttgagagatgtcccggaggtgaatgacattgtttgaggtgttggatgggggtggtaccctttgttggcttaatcccttataatgatgcttccctaagccagggaccttcatgccaagtacccccgcttatgtattttacagcattaaaggattatttccaacataaaatatattttaaagatggtttggggttgtcagaaaagtgctcattagcagagactttctttgaagccctgtgctctcggccgctttgagagagaccatttccttatagaatcactcaacttgggttgagagttctgagcgagttaagtctcctgactatgcctaattttccgcccacagatttaacaaacacagactgcttccccagacttccttcgccaacttcccccgctttcttgccccacctctcagtgaatgctgaagggcatctgaaaggaaagaaaaaggagagggatttaaatcctccatgcaaaacctacaacaaattgtcagctgggttggagtaagaagctcctttgtcttctgtaaatatagagcttgctgctcacgatgataagtgctgaaaaaaatcccaggcactctgggaacctacataatgggaacaattttcctttacacttaactagcaggttgagaagccgtctcccctccaactactcacctgcactttttacactacttatttcccaacaatagtgttcttccagcgtccaaagattgctggtgatgaggtgtcacctgctaaacggcaggaaggtgtcaacgccattgtatttggggttgactttgacagggaaataggaggtgtcccctcaccatgcctgcttcccacacttcctctgtgaattcgtgaactttcaggcccctccgatggcagatggggaaaagctccaatggatgtctcccagtggggcctaattcaaagcagaaatatgcagtctcggagtggaaatgaccatcaatggatgaatggataaatcataggatagtcatactcgtggaatatgattcagctatgaaaaggaatggggtactgatacatgctacaacacacttatgtcaagtgaaagaagccagatacagaaggtcatatttgtatgactgtttatatgaaatacccagaagaggtcaatccttagagccagaatgaagactgttggttactagggactgggggtagtggggaatggggagtaagtgcttcttgggtacagagtttccttttagggtgatgaaaatgttttggacctaggtggaggtggtgggtgcacaacattgtaccctagattccactgaagtgttcactttaaagtggttcattttcacacctgtaatcccagcatttcaggaggctgaggtgagaggatagcttgagcttaggagtttgagaccagcctgggcaacatagtaagagcttgtcgctacagaaagaaaaataagtaaaataggccgggcacagtggctcatgcctgtaatcccagcactttgggaggccaaggcgggcggatcacctgaggtcaggagttgagaccagcctggccaacatggtgaaaccccgtctatactaaaagtacaaaaattagccggggcatggtggcacacacctgtagacccagctactcaggagactgaggcagaagaattgtttgaatccaggaggcagaggttgcagtgagccaagattgtgccattgcactccagcctggatgacagagcaagactccgcctcaaaaaaaaaattaaataaaatagccaggcatggtggcgtgtgcctgtggtcccagctactcaggaggctgaggtgggaggatcgcttgagcccaggagttcaaggctgtggtgagctatgatcgcaccactgcactccagcctgggcaacagagtgagaccccatctcaaaaaaaagggtttattttcagtgctatggattttacctaaattttttaaaaagaaagaaagaaagaatctccttgggtagtcacgttttgttagaccgctgagcccaggcttggtcttggtatgtgctgccatagcccgtgtgcccaatgcggtggggaagtcgcttcttgccatggtgtctgttgtgacatttctgactggaatcctgccgggtgatgtgacactgtggagtctaaaggtcccagatcaaatcccatccccaccacttcctggaacaagtcagttttttcctaaggtctcagtctgtaaaattggaacagcagttcttgccctactgacctcataagacaagcccgagaatgattctgtttcccaaagggcactgagagtgctctggaaggaacgcacacggtctggagatagctaaagatgaatattttttacttggaaattcagataggactttttgttagttcttgagtttgaattttatactgtcatcatctggttttggtgtccagataatactggcctcatcgaatgggttggaagtgttccctcctcattagtttcttgaagagattgtggagaattggtgctaattcttttggaatatttgatagcattctcccctggaaccatctagcccttgcagttcttttttgttttctgggaggcttttaattaggaattcaagtttgttgttgttgttgttgttgttgttgggttttctttgagacagagtctttctctgttgcccaggttggagtgcagtggcacaacctcagctcactgcaacctccacctcctgggttcaagctattctgcctcagcctgcggagtagctgggtctacaggcacccgccgccacactcagctaatttttgtatttttagttgagacagagtttcaccatgtttggccaggcttgtctcgaactcctgacctcaagtgatccacccaccttggcctcccaaagtgctggaattacacgcatgagccaccgtgccccgccagaattcaatgttttcgtaggggtagttatttcatcttgggtgagtttgggtagtttatggtcttcaaggaattgattcatttcattcgttgtcaaatttgtatgtgtacagctaaaaaacaaaattgaagtatctacttttatgatgactttcagtttgtagcatataatccataatcagaaacctacagtaggcaggaggatcactcgagtccaggagtttgagaccaccctggacaacatagatcctgtctctacaattaaaaataaaataaatctctctccccatgcatagcactgggtcagatcctttgcatgggtcatctccttggtcttcaacacgaacctgcaagctaaacatagtaatccccattcaacccagaaggacacaagctctgcccaagactaccacgctgggaagtggcagagaagggatcagacccagaactccaaaggccattctaaacccaactgagctgaccaaggccccaagttccctggcccagccctcaaacttgccctccaaccccagctccttcctcggccagacatcacactgagggcatctgcaggccacacctggcccttaaacatatcctttttattacttttaaaatttgttgccagcatttaaaatcaggatatttcacatacaaatccagctttctggtttcttttgaaaaatcagaagatctgggcatgctgcacccacaatcccaaatggcatcacttggctgcagctgcccagaaaccaccccctataaatggctcaggtgttcagtttgccacagtcccctcattccctatcatctccctaacattaatgtcatcatgtttcattttcttcataacatttgtcactctctgaaatgaaatgtttcttagttattttcttggttttttttttttttttttttttgagatggagtcttattctgtcgcctaggctggagtg[132 bp omitted]agtagagatggggtttcaccgtgttagccagggtggtctcgatctcctgacctcgtgatccacctatctcggcctcccaaagtgctgggattacaggcgtgtttcttagttttttatgcccttctctgccattagaatataagctccttgaggcaagggactttcaatatctgagagcaaggagacagcattgcaaagtggtcaagagcagaggtcagcaaactacatccatcctatgggccaaatctgctccctccccactcccccagcttgtttttttaaataaagttttattgtaacagtcacacccattcgtttacatcttgtctatgtctgcttttgtgctaccgcagcagagttgaatagttatgatggaaaccatatgggccacagagcctaaaatatatgctttccaaacctttatagaaaaagttcaccacccctggtctcaagagccagactactcagatccaaagacagctccacttcctagccatgtgacctcagacaagtcactttgccttcctgtgcctcagttttcacctctgtagcatggatgtaataacaataatactcaccttatagggtcactgggggaggattacatgagttaatacatgtcgagtgtttggagctgtacctcctatgtagtaaagagtttttgtagataagcaaatgacacttttttttttaattgacagataataattgtacacattcatggggtacatggtgatgtttcgatgcatataaagtataatgatcagatcagggtaattaacatatccaccatcgcaaacatttctcatttctttgtgttgggaatgtttaatatcctccttctagctatttgaaactatatattattattaaaatattgtcatgagtggggcaaggtcagatataaccaggtccacgcacgtttatgtctttccacaaggtcaggctttcactgatgctatttcagttatgaaagccactagctagaggaagacaagagaatgacctgtctggagttcccaaggaggcaattctccttaatattaccctttcacttggtagtcagggccatgagcacaaaaggctgaaaccactccacaagtcagtcaatattgcaaaccatacataatagtatacttaattgatatataaatgttatagattagaatttcatgccaaacagcaacattaggcatcaagaataaaggggatatgaaaagggactaacgggctgggtacggtggctcacgcctgtaatcccagcactttgggaggccgaggcaggcagatcacttgaggtcaagagttcaagaccagcctggccaacatggtgaaacccccgtctctactaaaaatacaaaaattagacagacctggtggcacacacctgtaatcccagctacttgggagactgaggcaggagaatcacttgaacccaagaggcagaggttgcagtgtgccaagtgcactccagcctgggtgacagagtgagattccatctcaaaaaaaaaaaaaggtgggggagtggggggcctaatgaaccagtccaaggagagtgacatgtagaaggagagagtcctgatccgggcacttgccagtatcttccaagagtcctttatttgggcagagccttcagcttcaaattctgggtgctgatgacaagtgacagtgagacagaatgtgttaagatgtcaagctggtgaggtcctgctcattttatgacccttgagtcctctggtgaggactggtggtaaagggttacacccttatctggttgggtgttgtctctattgattaggtagacatctggactcttgttgacttgatgacttttaaaatgtaagatggagtctttttctaagatggagtcacttatgtcaagggtgtgctatacatatagtatcttttaaagagctgcatctttagaagcacattgctggttatgtaagatgttctatctgaggaagtgtgctgaagtgtgacgactactaataataagcagaaagcacgtggtgttgatggggatgttgtcaatgctgatggcagcagcgggcacttgctgggcatcaaaccctgttctgagtccttggaatgactttccataaacaaacccatctcccatgtcaccacatgcccctcagccctgggcagtgactcctgttagggtgatcatctcatccaggtttgtctgtgactttcccacttgtagcactggaagtcccaagacccaggaaacccctcaatcccaggcaaatcaggagagttggtcactctactccatatccacaatccattttatctatttatttgttatttttgcctttaaatttatatcctagaaaaatactttaaaagctgctagacatgtccagctgaaagaacattcttcaaagattaaaaaaaaaaaaattctaagaggctgaatagttgcacaaaaccccaaaagaggaaccggtttcaacatctttctttgttctcttaaatttgaccatgatttcatcatttgtcatgagtttgactcttgtgattcagcgatgatggaatgtatcctacagtcttttggttaagttttttttttttttttttttttttgagacagagtcttgctctgttgcccaggctggagtgcagtggcactatctcggctcactgcaagctccacctcctgggttcacgccattctcctgccttagcctcccgagtagctgggactacaggcacctgccactatgcccggctaattttttttgtatttttagtagagatggggtttcactgtattagccaggatggtcttgatctcctgacctcgtgatccgcccgcctcggcctcccaaagtgctgggattacaggtgtgagccacctgcctggccagttaagttcttgttagtacagatagacccattatcttttctatttttggtgttctcccacaaaactgtcgaagaagccaagtttttttttaactttactgtttaaacatgtgaatcaacttattttttctttatcagcatcattttcttgtcttcctctaaaaaaaatttttttaaacaagctgatctgccttccaaaagtttccaagtaattaaacccaattaaaaccattaaattctttcttttaatgacaactttattattaaaagctaaccacaaggaggagatttaactggcaaagctctctgttgtgtgttaatccattcctgacctctggctgacacttccaagagataaaccccacagaatagggagctggtttaatgaacagctttaattaatacttttcttccttgtggcagagtaattatttgttcaacttgtaaacagctccttggcggtgattttttaaagacccagttggcttggatagtgtgatggttttgatgtgttttgtgtgtttgtgtgtgtttttttttctttaaaagagagaggggaggagatctccattccaggattggtgctgaagcacatgtgtcctgaagttcaggacgtcagggtaattgacacagaagaaaagtgaggcgaaggcaggcagcaagctgcctgtatttttgagacatctccagagagggcaggtctgcagacgggcaggtctgcactttgcagcaacagtctgcaagcccagacaaggcccccaaggagacacaagcccagcccaaatgcagtctgagtgttaagaaaggaaagggcctgggattgcaaagcgcgaggccaaacgcctcccccgaccttcccttcgcgtggcacctgagaaaggggcagcccagtgcaaatgctaggtgtgaccaaccaggccccggagaagcgattctgtgaacaaggatgactagcccgctagtagtgcttgccgcaagccgcccatgcatcccaagtgctttccacccatcacctccctaacctgtctcagggaggtagatgccgtgggttttcgtgaggttaagtggcctgtcccaagtcacgtaccttctagcaataagggcagagcgcagattgcagccagctgtctggctgcaggagtcagtcctaactactgggcagagctgccccttgagacaagaaagtggcacctcccactcagctggcggggagagacttaggtttgttttttttcatttagttcatctcttagttagaaagctggtttcattaacaagttagaaagttagtttcattgcccactctgtaattccaaagttaatttactaacactaaggaccaagctttttcattattttaaaaatcatttagaggagtgattctcaactaggggtgatcttgtccctcagaggacatttggtgacgtctggagacatttttgactgtcacaactgggtaggcgtgctactgaatttagtgggtagaggccacggatgctgctcaaattcctacaacccacaggatggaactacaacgtggaattatctggctcaaaatgccaacagtgccaaagcggaaaaaccctgatttgtagaatcctcaaatgtttcattcttatataattactcagacttttcattcttgtagaatgctcaaatgctcactctagaagcaatttgtaaacacacaaaagcaatattaatgcacccatcagtccccaccccaccccctcaaaattaggctgaatctcttataaaaaaaaaaagttaattaattaacttagtgaatttgttaaccaggccaccagaaattcttcagaaacacatctaaagtgccactaactgttctcaactgaacagttagttacggatgaaattgttagtacaagaatatttgaagacagtccccaaattcccaaacatctacctctacttattatgcaagtttccttaagaaaatgcttatgtggccaagctcggtggctcatgcttgtaatcccagcactttggaaggccgaggcgagaggatcacctgaggtcaggagttcgagaccagcctggccaacatggtgaaatcccatctctactaaaaataccaaaattagccagctgtagtggcacacacctgtaatcccagctactcaggaggctgaggcaggagaatcacttgaacccgggaagcagaggttacagtgagccaagataacaaaaaagaaaagaaaatatgtatgaagagcacaaagcagattaactaatttcaccctctgagcctccttgggctgagggatgtgttcagagatctctgatgcctctttggggctcccaagactctcctccccaagggctcagagctgtgtctgaagctggaaagataagcagacagtcctggagggcttaatcctgggactgggttgagtccaatgcttaagatgtcagaattcaagcttcttagagcaagggccgtaggcttcgtgtttctatctggaaggactgaccgtggcatcccacctgcaagacccttgacaagagcgaaacagacagctagcgttgctgacagaccaagacattattcagagagtgttgctgttttctgaaaattatctttggatatgttgcatttgataagattaatggatctaaagaggccctaaagttaatcttttcacaaacacacctgtttttgactcctagggtgacatcctagaaagacatgggctacaagtaagtgaggggaaaggctgggagcagagagagatggttctgagcccttcgggggcagctaaaatgagctgatttccaatcgcggccaaggtgtctggttcccgcagagccattcccggcctttggcaggcagcaaatggcagctgacaaggaagggattttccagttagctttgccttttcatatcaagtccaggaaattaaagacacacatactccacagcaataaggggagacggtttcccaccctgtgggctctccttttgtcccctccaaagaccagcattgcagttatcagagaggaaagccagcctgagacctgagaaaagaatcagggctgatttttaggtggcagctgcctgccgtttctcctcactttggaagtgtaattgtcattaaacatgttgtttgtttcattaaaagtagacatcaacagttacaaatcaggcatttacgaaaaaaaaaaaaatctggtggttatctgccctaagcttttttttcctaataaatcatttcattttatgttactagttcccatgaagatatatttatgagtaaaatggttaagattttggattcttgagttagacagtcctagatttgaatcccagctctgccacttattggcagcgtgaccttggacaagtcacttcatcagtctgagttttgatttatctgtaaaacagggaaaagatattttgaggaggaaatgggataatgtacacaaagttcacacatattcatatattcatttaaaataaaaaaatggccaggcacggtggctcatgcccataatcccagcattttgggaggccgaggtgggtggatcacttgaggccagaagtttgagacaagcctggccaacatggtgaaaccctgtcttcattaaaaaatacaaaaattagccgagcatggtggcatgtgcccatagtcccagctactcaggaggctgaggcaggagaatcacctgaacccaggaggcggaggttgcagtgagccaagatcatgccactgcactccagcctgggtaacacagcaagactcttgtctcaaaaaaagaaaataaattaaccaagcatctgccattcaagctctgatctaggtatgagggacacagtaatagctcccatggagtttgcctcctacttagaggagaagcacaaaaaattataaataaataaataagagcatttcagtcaatgataaatgctgtttaaaactgcaacagagtaatgggatgtggagtgagtggggaggagtatgttagtttatttcatagggaatggtcagagaagacctttctggcattgaaagtgggaatggaatgttacaaaggatccagccctgaaagagcctgggaagaggggatttcaggctgaggaacagcatgtgcaaaggccctgaggcaggagcaagtttggcagattcaaggcagagtggaagagtaggtggttactagagcacatgaggccactagaagacggtggctttactcagagggccaggggaagccagtgggttttaagtgaaaagcacagctctgatagttgttttaaaaagagcactctggctgctgtgtggacaacagacatgggggacaagggaggctagctgcctttatagtggcccagcacacagaggggctccttgtcttcctccctcaccgcccccctctcttggtgatggactgaaggtgccttggaaataagataaatgacaacatgcaaataaagtgctgagcgcaggagcaggtgcatagtagaccatccaaccagcaaagctctgataagaattattattttggggaactatctcttaatcccttgctccttggaaaacctggaagaaatcaggcaattggggtataaggaccaggtgaagtgctagagccctcaggtcaggggagcagttgtgccccccaccccagtcacatgcatgtccccctccaacccccaccacggatcagatcaaatgaggatggctagcatcagggtctgagtcactgccttagctgccagtttttcctaaagcagatttcaaccttgaaataaatctcttaaaatgccttttttatgatcccaaaatgaaaaccccaaataatatagctgaccactcactactttaaaaaaaatgaatgtagtatcctaactgtaacttaacggaaagaaataaaagaaggtttattttctttttttttttttttttttttgagacagagtcttgctctgtagcccaggtgggagtgcagtggcacaatctcggctcactgcaagctccgcctcccaggttcacgccattctcctgcctcagcctcccgagtagctgggactacaggcgcccgccatcacgccccgctaatttttttgtatttttagtagaggcagggtttcaccatgtcagccaggatggtctcgatctcctgacctcgtgatccacccgcctcggcctcccaaagtgctgggattacaagcgtgagccaccgcgcccggccgagaaggtttattttctaaaaatatgtatttcagtatgtaaatgctcaaacatgaccgcaatagaagacatgacaaaggagtctgatactaccacccacttctcatttaaaaggttgcatttcagagaactaggaagatctggggctcttctctactagaagtaaaggaaaatggaagaacagagatgggatggaccatgggatacaaacaagtatattcagtatttatcaaaaccatgcaaagcccgggcgaggtggctcatgcctataatcccaacactttgggaggccaaggtaggcagatcacctgaggtcaggagttcaagaccagcctggccaacatggtgaaaccccatctctactaaaaatacaagaattagccagtgtagtggcgggtgcctgtaatcccagctactcagggggctgaggcaggagaatcacttgagcccaggaggtggaggttgcagtgagctgagactgcgccattgcactccagcctgggctacaagagcgaaactccatctcaagaaaaaaaaaatcaaaaatactctatgtttacttctataaaggagttagattctaggctcagatcattagaaacaggtttttcacaacgtgagtgttcatcaggagatatgaaagtcacatgggttgtgggacaatttttctttctgtacaacttcctacagtgcattagaagacattaatatccttggcacccccaaataccactatccctctcaactattacaacgaacaaaatgcttcccccacaaatttccaaaccactgtctaggcggaggtgccacacctgccgagaaccactgccctaaaacagattcatggatgatatactcaaaataaccgcatttggcaattttataattgcatgctgtggtgggcagacaaatggcaccccaaagacgtccacatcctagtccccagaatctgtggctgttaaccttctatggccaaagggactttgcagctgtgattatgtgtccctaatgtaatcagaagggtttttataaaagggagggtggtcaaagtgggcggtaggagatgtgaggccagaagcaagatattggagtgacatgaggaaggggccatgagcccaggaatgcaggtggcctctagcagctaacacaagcaaggaaacagtcttctcctctgaagccttcaaaggaacgcagccctgcagacacctctcatctctagaactattagagaataagtgtacattgtttaaagccactaagtttgtgctaatgtgttatggcagccacgggaaactatattacatgtgtttatattcatggtgacttcccatttatggtgactacaccaggttttctatttatgatcatgataacaagtttctttctaaactaaaatgcacttagattttgtttttgtctttgaaacagggtctcactctgttgcccaggctggagtgcagtagcgcaatcatagttcactgtcacctcaacctcccaggcttgagcaatcctcctgctaggactgtaggcacacaccaccacgcccagctaattttttaattttttgtagagatgaagtcttactatgttgtccaagctggtcttcagttcctgggctcaagcgatcctcctgcctcagcctcccaaagcactagattatgagcgtgagccaccatgcccccagcgaggtgttttagaaggagggagtagccaaattaaaggaaaatattaagttaataataacacagctactctgtagcttggcagaacttgcaaaggtgttccaagaatggccctagtttggaaaataacaggttaaactatcgcatgggaatttctcagcgggagaagtcttctgttggaagcttctgaatgctgctgctttttgttagtaatacctaggcaccaggtgttttgcaagacacaccacacacaaatcctcaggagccctggaaaggactcactgcttatgttcagctgaagaaactgaggcccagggagagtgaacatctccttcaaggtgatgtacctggggaatggcagtcccaggatttgaacctgggtcctgccaactccatgggtgatgctctcaaccactttgcttcatggagattcttgtctatggccacattcatggataccttgtgaatgatggaggcaatttgtggtggccatttgggtgagtcccttgccccattaggcaatgcttgtataagggagaggttactcttttcagactacataataacccaggcccttccatggacttggcttaaatcaccttggggtgggggtagcaagaggtgccatcagaagagaagacagtctttccaaagtgcttcctggcaaagctcgaccattgctaagatgtaaagaaacacttgggcttgctcagcaggccttgtctatgccgcaaacacccgtttttgcttggaattggcacgttgcatgctgagttaagaatcttttgattataagcgacagaaattcaatgcacatcagcttaggccaaaaaggagaatttgttcatgtcaccaagatgtccaaacgtagacctaaagcaaggtgggatccagctccctaaatattttcatatgaatctgtgtgcactgtcaggaaggctctgcctgtagggtgacagagatggctgccggcatccttgagcctagatctaccagctcagccaccccaggaaaaaaaggtgcctctcccaggagtcatagctaaagtcctcaggccaatgcccattggctcataatcatccttgaatcaatcactatgattctagccagggatgggttatgagatcaccctgaaagacccataatgggtgttatttttactaaaaattattaactgctaatttacggatgtgactgctcattctcagagagattgggtatctccacaatagcatgctgcctcctttgctaaccggttgttttttgaaggtgtctaataaagacactgtgttgggaatccccaagaccaccttcggcctcaatgattgactagaactcacaaggctcagagaagctgttagactcacagttacagttattacagtaaaaggacacagattaaaatctgcaaggggaagaggcacatggggtgaaatccaggaaagaccaggcacaatcttccgggagtcctctcccaggggagcacggacactccacctaattctcccagcaacaatgtgtgcgaacacatgccaagtgttgccaaccagggaagcccacttgagccttgatgtccagggtcttattgggggtcagtgacataggcatgcgacacctaagtaactgacctcagccactcagacaccagcaccccagagcaaaaatagacattcaccataaactacattcttagcctaaactatctcaagtggaagtgcatggtgtggcccaagggcttggagctcatgcaccaggaactggccaagggccagccctgaagacagacatttcttaaggaatgtgcagggtttgagcaacccaggcctgctgagttaaccctttcctgcacagccagcctctaaatctttatagcagaccccaaatgaaatcagctaaatggctcttcccaagtaaagaccaccagatagcgtagatgtctggtgcacttggagattccacagaggggacagcacatcccttctgcccagtcatgcagctgagccatggaaggcagacgctccctcagagcaaaaaagccatgacaggggtggtggcctaaccagaggattatggagtctggagtcagattagacctgagttcagtgccaacactttctcttacaagctaagcaacattgaacaagctacacagtaataatagtaacagtaatagcaatataaacagtagctattattaagctaacatttattcagaccttgctatgttccaggcatggttttaagcacttaaacagtcattaatttattgtttttaattttttttacatggtcacagtaagaaatacattttacactataacccaccacatacacacacacacacaaacacacacacaccccaactggaataggtgttcaccattgctgtgtatgatagattctgatagttcgttgtctattgtaggaattaacaaacttttcctataaagggataataaatattttaggatttcagctaggtcctgtggtgactactcaactatgccattgtaccatgaaaacagccataaataaacattaagtgatcaaatgggcactgctaggttccaacaaaactttatttacaaaaacagacaacgggccgggtgcagtggctcacgcctgtaatcccagcactttgggaggctgaggcgggcggatcatgaggtcaggagatcaagaccatcctggctaacgtggtgaaaccccgtctctactaaaaatacaaaaaattagccgggcgtggtggcgggcacctgtagtcccagctacttgggaggctgaggcacaagaatggcgtgaacccaggaggcggagcttgcagtgagccgagatcacgccactgtactccagcctgggcgacagagcgagactccatatcaaaaaaaaaaaaaaaaaaaaaaacagacaacaggccatagttccatagtttgctgactcctgggttctattatatttcttccagtcttttttttaatgctgttcattaaactttcactaaaaggattataacctgcacttttacaaaaacgtatttaatctttacaacaatcctatcaggtatataagcccattttacagatgagaaactgagacacactgaagttaagtaacttgtaagaagtggaactggccttgatcagaggtagtctggcttagagcccaccttcttcacctgtacaacaaagcactcactagagattggccattatcattatcaacattattattaattattattattattattattcagccaggagttaagttatgaaggaactcatatttgaattatgaaggaactcaaaatcccacagtcacataaaccagtttcaggatgaaatcggcatgccttccttttgttcaaagggttgtacagctaattagtatgtaaatctcacttctttgaattgaacacattttagagtcatctattacaaaagtgctgcatgcttgaaacagaaagcttgcaaaatctgtaatctcagcactttgtgaggctgaggcaggaggatcacttgaggccaagaattcaataccagcctgggcaacataaggagaccctgtctctacaaaaaaaaaaaaaaaaaaaaaaacaaacaaacaaacaaaaaactaattaattaattaattagctaggtatggtggtgcaagcctataatcctagctactcaggaggctgaggtgtgaggatcaagaagatcaaggctgcagtgagctatggtcatgccactgcactccagcctgggtgacataggtagtagacctgtctcaaaaaagaaaagaaagaaacagaaaacttggaaaatccaggaaaaaaagtctttaatggatagagttctgattcattaaaacaattttttggtaaaaatctatatgtgttattttgaaatgagaacagttacctcctaatctatgtggactgggaagtagacttacaatacggcataaattggagagctgataaatttgaggatggtagagacacttgatagaaaacaactgtttagtcttaattaactatgaataactttggcattcacgttttgaaactcattcatgtttgctttacatcagattaattttattttaagaaagatttttgtatactcttatcctctccctttcatccaagaaatacaaccatacatcccaagatagtgatccacgaggcagatctttgggccgcctacgtggtgaaaggccccaccaacctcctataattcagagaactttgcctgtaattccagcactttgggaggctgaggcaagaggatcacttgaaccaaggagtttgagattaccctgggccacatagcaagaccctgtctctacacaaaataaaatataagccaggtgtgctagcacacgtctctagtcctagctacttgggaggctgaggcaggaggactgtttgagtccaggagttcaaggctgcattgagctatggtcacaccactgcaccccagcctgggtgacaggggagaccctgtctcaaaaaaaaaaaaaaaagaacttcatcaagaatgcataatagttatattactgagctgccatccaggtccatagcctctctcctgaagggcagttccaactcgaaacctcttcaccagcctcccacacaagtatgcagagcccaccacaccatcataaaaactgaacccggagaaatctgtagaacattagggcacgctaagaaaatctacagcgtctttgtctgatccgtaccttcgcctcaagagaaccacccacaagttctctagtcaaacaaagatgacattccatccacccccaccccttagcccccagcatggtccttcccaggatgagttacacattgaagcctgttttggaaaaactacctcctctcagttcattctggtttaaattgattttttttaaagtaatccacttatgctgttgcttgtttaggaaattaaccactgttgttttttgttttttaatccaaagaatatgtaatgcttcagaaaatgggtttcatgtaagtggcatgttaaaagcttttgtaccaactgatgtggggtcttcctgctgggttcgcagaaacgattctttgcttaaaggctcaaggaaggggactgggggattttgacaataaccaatgcttgtggagtgcctgctgcagtccaggcctgggctaggtgcttccacacgtgctgtctgatttaatcctcactgcaatgttaggtcttagagggatcaggctggacttgaaggggtcagtggcccgaaagagcatggtgtgaaagctgtctattttaggctttatttgactgggagaagttctgggtcagacagagggttgcctccaagctgtcctctgtgactaaagtcaagacaccaggatggaatatttatggtttatagtagggctgcattcagcaggcagcccaggatgaaactgatggcttttgtcttgtcctcactccagatgtatttcacataaattaatactgagtcaccaccaaatttttttttcttttagtttcttgctctctgcaaccctggaaaaacatttcctacttggataaactatgcagccataaaaaatgatgggttcatgtcctttgtagggacatggatgaaattggaaatcatcattctcagtaaactatcgcaagaacaaaaaactaaacagcgcgtattctcactcataggtgggaattgaacaatgagaacacatggacacaggaaggggaacatcacactctggggactgttgtggggtgtggggaggggggagggatagctttaggagatatacctaatgctaaatgacgagttaatgggtgcagcacaccagcatggcacatgtatacatatgtaactaacctgcacattgtgcacatgtaccctaaaacttaaagtataataataataaactaaaaattaaaaaaaaaaaagtgttctgacccagggcaacactgtgttacttgactcctgagttagccttgcttttctgaggctattccagacttttctgcctctgtgcaactagtttttatcgtgttttttgaacagaggtaccacctacatagcttaaaacaatcttaggaaaatctgaaataataagaatgctccaagagtaggtgggtattctaaaggctcatcatataaacatttgggtgtcttcaatctttagaaaaatgtttaattacatgataagtatttgaatcccttctcttttaaaaaattctagaaggctgggcatggtggctcacgcctgtaatcctagcactttgggaggccgaggtgggtggatcgcttgagctcaggagtttgagaccagcctgggcaacatggtgaaacccctgtctctacaaaaaaaaatacaaaaaaattagccaggcgtggtggtgcacacctgtagtcccaattacttgggggctgaggcaggaggatcacttgaacctgggaggtcgaggctgcagtgagccaagattgtgccactctactctgggtgacaaagtgagaccctgtctcaaaaaaaaaaaaaatctagaatattctagataatactgaagttcactttgaccatcacttttaattcctgttccttcctctctgccttctagaagtaactgcctttctttttgtgtacagcctttcagatatgtataaatatgtaagtgcacatggaaaatatagtaacattttatgtgtctctaataaacggtaataacatacagtacatagtacataatgcaatcagaaaactttttttcactccagtgtattttttgatgtgtccctgttaatacatggagatctggtgcatttccttccattgaaatttcatttcccattgtatgaatagaccacatttcatttttcaagtctgctttgaagtgatagctaaattattcccaatcttttgctatttactaacaattctgtaatgaacatcttcgatatgtccccttgctcatgtgtatgagattttctgtaggatagataatgaaaagtggaattactgagtatgttgcctgttatttttaaattgttaatccaagaaatatatgcctatagtttaatattcatagttctacaaaggaatatatatggaaaacagcagtcctcagtgactgcccaccacccttttttcctgcccaggggcaacaactcttgctgctgcctttaaaaatgtaacctccaaattatttttattttattttatttttttggtacggagtttcactcttgttgcccaggctggagtgcagtggcacaatctcggctcaccacaacctcctcctcctgggttcaagcaattctgcctcagcctcccgaatagctgggattacaggcatgcgccaccacacccggctaatttttgtacttttagtggagacggggtttctccatgttggtcaggctggtctcgaactcctgacctcaaatgatctacccgcctcggcctcccaaagcactggattacaggtgtgagccactgcacccagcctcactcccaaatttctaagtaacatccttaggtgctacttcttgattctttttttccccccattgtaggcatgatctctggcttcccaaaatatactaattgagctctcttttctcacccttgaccccaacacacacatgcaaactttctcttcatgtcttcccagtatcagtcaatcataacttgagctttaccaatatgcggtatttgccttcttacaactatataaatactcttcacagagaagtcatttggtatgcaataattacttttccttctctgtgtgctggcctgggaggtgacaactttcagaataaatcctttcagcaaacaagtctgggtggcagctccttcttgcttcttgtccagtacatggagggttggtaatcagtgattaggtgcacgaattgctccgtcaaagaggagtgtgtgattgtgcagaggtgaaatgctttggatatgagtaatgcaaaaccttttcccaggtcacacacgattccctcctaggccctgagaagtttgttttcctcatttgctcttcatttttcactgagtaccctgccccatcgacttccagccaggaccaagagtgctaagctttggctctcggggccttgatgaagtgttttgcctaatggctgtgttcctgggcctgattcttcacagttgtgtgtgtgaagctgagatcaccagctgcatttttttctttctttttttttaagggtcaaaaagggtttatgtccttaattatttatttttataatagaaataatatagcctccagtgaaaaatttaaacaggaaaaggactgtatggagcaaggggacaaggcccctgtcgctcctctcccaactcagcccctttgagtcctcagaagcagtgttgttccagaaccagattacctatgttctaatctcagcatttgttagcttgtatggccttgaacaagttgcctaacctttgtatgcctccattttctcatctataaaatgggtgttttagtccatttagtgttgctataatagagtacctgaggctggataatttataaagaaaaggggtttatttgacttatgattctggggatcggcaagttcaagattgggtagctgtacctggtgagggcctcaagctgcttccattcatggtggaaagtggaaggggagtcaacgtgtgcaaagatcacatggggagagaggaagtcaactcttttaacaactcacactcttggaaactaatctattcctgagagactgagaattcactgactctcatgggaaggcattaatctattcatgacccaaacacctcctactaggccttacctcccaacactgccacattggagatcaaatttcaacacgagttgtgacaggaacaaaccaaatccaaaccatagcaatggaaaaataatagtgttcacctcacagagtttggtggggattaaatgagttaatacttataaagtggcacagagaaagcacttcatagatattagccaggaatattagccaggaatattattaacagtgtgttttatatcctcctagactagtggttcttaaccttgactgcatattgaaatctagactagtggttcttaaccttgactgcatattgaaatcacctggggagctttaaacttcttggtgcctggaccctgctgtcagcaattctgattttattggtctggagagcagcctgggcatcaggatttttaaaggcttctcagagcatcacaatatgtatccaggggtggaaaccattgtgctgcatattttccatgtgtatcggttaggataggtaagggcatgctgcagtaacaaacatccccaaaatctcatctacttctcatttatgatacatgtccattgtggtcagctgtatctctgatccacatcatctttattctggaacccaagccaacagaatatgtgtgggcattggtgaacatagctgccttccaggctaacagaataaatatccagaatacttgcagccttgtgaagtgagaaaagagagtgcatggggaagtgtgcactggctcctaaaaacttctgatcaaaagtgaaacataacttttgcccacatatcactggccaaagcaagttgcatggtccaatttctaagtaacatgcgtatgtgctccttcttgtagcacatacaagaagtatgttttttcagttgtaggtatgatctcttgcttcccaaaatagaagaattgagctctcttttctcacccttgaccccatcacacatatgcaaacgttctcttcatgtcctcccaatattaatcaatcataacctgaattgaacagggagggtatgtgtcagcggctggatggtaaatattttaggctttgtgggacacacagtctactcacctctgactttgtagtacagtgtagacaatacactgattttctaaaaaaatgtaaaaaccattcttaactcattagtcatacaaaaacaagcagcaggccaggtatggcgtgggggctgcagcttgccaacccctgctacatgtcctccttttgcagggagaagcacctcagggagggaccccaaatatgggtgaacagcagtacagtctaccacactgtgtatacagaaaggaggcactttcattgcacaagtgtgcaaattcatacgttatgctgtgttgcagcttgcttttgttacttagtactgtatctcttgatgacagtttcatatcagtaactccagaatgacttcgtttgtataatggctgcctagttttccctcctatgaatgtaccatagtgcctttgtgtttgtgtgtttttatcattaaccctctattgttggataacagggatttttttaaatatcaagaggagggagtaaggcagtgtgcctagagagattgttggagagagagactcaacatcccaactctcccagtagtttatactgaaatcttccagacctccctgaaaacaaaaatgtgttgggggcaacccctgaaaacatgcatttgccaggaggccctgttttattacagccatatcatatctgtgataagtgtccttgcaacgctgaacactgttgcaatcccagggtcattttccaggagatttaaatactggaaagggtaaaaagaaatggtgaaaactggaagtgagatcccggaagctgtacaacatgattatcacaccggcctcacacagagactcattttaggccacgcgtgagccgagcagatgaggaaaaaccaaaactgcttttcggcagtggaatgggaccaaaagggtagctaagattcctcaggctccgcgtgcatgtgattttccccttctctgcctcgcaggacaccacgacgtccgtgcgcattggccttatgatggaagagatgatcttcaaccttgcagatacacatctgttcttcaatgacctggaggtttgtggttgctgatttcatttaatatttgccatgtttaatcacctgcatctagtttatgggaagaaggatgctgcctttcctttctttttctttttctttttttctcctttttcttttagaagcttgaaacttttgctaacaacccccaaaaaggcccaaaactgtggccggtgatggtttattggaaacacacttagctcaattatctccctagctttcctgtgcagttaacgggctcttctctgttccagtggtagtgtccactggcagttttactaatccaataatggctatgtagtttcttcctcctgaaatttgctatttaataagtttattaaggcaaattagtacagatcctcctgggtcagtaataattagcagtggcccagggtggaagcttttaaaaacaatttacattcccctgaaagcatgttttataaagagaaagagtgagagtgagcagagggaatatgcttatttaaagtatctgctcctgagcccgtaagcaagatccaagggagatagggaaaaaagcgggagagcagcttcaaaaataaattgaattcatttgtttatacccagcctatgtcagaaaggatttcgaatgggaaacatatttagaatagaactagtaacacaaaggcaagcggaagcaaagctatgtcatgaataagggtaagacattgcacaaaaaaaatccaggctcaggctaactattgcaatcaagttcagagtgtatcacttcctggtagccaaagtaaagagggaaatacaatgagttacttctctctaatgaaagagcaagcaactttctccaacgtgaagaaggggttttggctgataaaaggatcagtaaggaaatcttctggctttgtaaattatgttcaccttattggttcaacagattgaaaagtaaaggcaaccggccgggcgcggtggctcacgcctgtaatcccagcactttgggaggccgaggcgggtggatcacaaggtcaggagatcgagaccatcctggctaacatggcgaaaccccgtctctactaaaaatacaaaaattagccgggcatggtggcgggcacctttagtcccagctacgcaggaggctgaggcaggagagtagcgtgaacccggaaggcggaccttgcggtgagcagagatcgtgccactgcactccagcctggcaacagagcaagacaccatcaaaaaaaaaaaaaaagaaagaaaaagaaaggcaatctaaaataaaactgtatacaaaaaaacaattctatttctcttagtaggaatattttttcccggaatctggaatatccctggggactaaactgaagtagaaatataaaggttatggatttcaaatccatcctggctagcccaaggcactactaatatttatcattaggaaagcatacagatttttctttctagtctgcaggctggagttccagagagaggaatccttgctgaaataatcagtcttgtgttttgtctaatctatgtaagcctcttgggcctcagtcttcacatctataaaatggaattggtattctttgcccaacatctgtttcaaagagcagaactaggtagaaacttgaggaagaaagagagctttggagcaatggagaataaataccattggcttcaaggcttgggactgtctctattcaaaagcaaagttcaggctcgcttcacgatgacgtctatggctcgaaggacacaagagagaaaacaaacaaacaaaaactgtggccgttgaattcagtgagtatttatggagcctaatgcggtaaagactcagccgattgcaaagatcaaaacccaactcgttttaaccaaaagtggaaattattggcccttgtagttgaaaagtccagggttgttttcattcttgcttattgcccccacttctgtgagaacagggaccactctgtgtgattgaccctgaatctctagggcccaggcagtaaacaaccaaacaaatccataaacaagaccatttatgataataaaaaggatatgaagaaaataaaataatcagatgtgagaacaagtgatggggatggaggagggttggggggcagcattcttgagggggccggtccagggaaggcctcttaaggcagtagcacttgaaccaaaggatgacaagcacccattcagatggagatcgggggcagtggggcggggacagcaagtgcaaaggtcctgagtgagaacaagcatgaaggcccctgggatcagagagaaggcatggaggccgaagtgcaggagtaaaagtatggaggtggccaggatagatgagcctggggcaggagatattacagcaatcgaagctcattctaagtgccttggacatctctggggcaagctgatattaagaaggaaaagccacatggtctgggttgtgtgttaaaaagacctctctggctgctgtgtggagaatgggcagtcagaggagaaatgtggtctgggcatggtggctcacacctgtaatcccagcactttgggaggccaaggcgggtggatcacttgagatcaggagttcaagaccagcctggccaacatgatgaaaccctgtctctactaaaaatacaaaaatattagccaggtgtggtggcgggtgcctgtaatcccagctactcaggaagctgaggcaggagaatcacttgaacccaggaggcagaggttgcagtgagctgagatcaagccactgtattccagcctgggcgacagattgaaactccatcttaaaaaaaaaaaaagtaaaaaagaaaagaaatgtggaggcagagagaccagccaagaggctactgcaatagtccaagcaagagaagaaaatggactggatccaggtggtaggaagacgtggacttgagggtgaggtgaagccaagaggacttgctgatagactagatgtggaggttgggggagagagaggtggcaaggactcctgggcttgatctgaccaggatgtgttgtccttcactgagatgggcaaaacagaagaggtgtttggtatgcagtggaggatcccatccccctgtctggggtacgtggggtttgagatgtctgagacaccctggtgaagatgccagatcaggcagcagatagatgagtttgaacctccactgcagtaacaacaccaggcatggaataggcgccttgtggatcttggttgaacctgcgactcaaagccaggtattttgtgggatttctgtgtatttcaagctgatgtcttcagagtcttgccccactctgctgtttctgtctggcccctgaagtcgaagttgcacctctggaaggaggatcttaattaccagctggagctacttagggaagccagtttgtttttattttctaaatttatttcgaaaatgtcccagtgccagaagccccccagggcacctcagcagaattgaaaccacgttatacgatgatgaagttaaaatccacacaagtgaaaacatattgtttgttggtgcaaggcagtccctgtcaaaatctaaagcacagccttctgcagctgcccagggaagctgtgtggaccagagagaggcgtgctcaaggcccggcaaagccagaagcctttgttctccgagcctgtagtagtaccacctgtaagggagttccttcccgcgtccagcagcgctttatgaagggcttaccatttgccaggccctaatggaatgctgtggattcagcagcaaaccaaacacagcaagacccgtgcccacaaggcattgaccttccagttcaggaggctgaccataaacaatggaatgcaaagtataatgtcagagcaaagtgctctgaagagagaccaagagagtcagggaggaggctctcaccagggcttttgttttgtggtttttacttgttatatccaggagaggctcctctgactttttttttttttttttttttgagacagtctcactctgttgtccaggctggaggtacgatcttgtcgcactgcaacctctgcctcctgggttcaagcgattctcctgcctcagcctcccaagtagttgagattacaggcacacgccaccatgtccagctaatttttgtatttttagtagaaacagggcttcaccttgttgggcacggtggtctcgaactcctgacctcaagtgatccaccctcctcaacccccaaaataccaaagtactgggattacaggtgtgagccaccgcacccaggctcttctgacttttgagcaaagacctgaaggaggtggaggaggaggccatgccgatatctgggtgaagagtgttccagatagaagcactgtgcaaaggccaaggtatgattagagttgatgggctccagaaactgggaggaaaccagcaagactgaagcagagggaacaggaagaattgtggtgggcaatgagggtgacgcctttgggccattgtaaggctttgggtaacagccaagggtgacaaaagccactggagggtttggaacaacatgatgtgactttggttcagaagctgcctctggctgcctggtggagaacagactccagaggacaaggattgaagcaggcatccgcattaaatcagcaacttccagactcccaggggaaagaatctgtggggtttaaagaatggtccaggattggcctggtgcggtggctcacgcctgtagtcctaacactttgggaggccgaggcgggtggatcacttgaggtcaggagttcaagaccagcctggccaacatggtgaaaccccgtctttactaaaaatacaaaaattagccaggtgtggtagcaggcgcctgtaatcccagctacccaggaggctggggcaggagaatcactggaacccaggaggcggaagctgcagtgagcagagatcgccccactgtactccagcctgggcgacagagcaagactctgtctcaaaaaaaaaaaaaaagaataaaaaaaaatggtccgggacacagaaggtgccacatgcagctgtatcttaggatattctgcacgcatgtcccaagttgaggacaaaagccttctaatcagttccatctgctgttgagtcctggatccaccatctcctaacctgggcaagtctctccatccctctgagcctcagtttgctcatctgttaaatgggtggaagaaaagcccccaccatctagggctgtaaggatggagctatgtgaaagcagtcagcacagagcctggcatacctgcccaatgtgggggcctttccaccagggggctacaggggctacatgtgtccctggggataggcaagtgggggttctatggtaccagggcaaattgtttaattgctacatatttattttactgtgaattagaaaactataactagcttgccgacccctgattttacaatcattttataaaagtataggcaacagaaatatgacaaagatgatgacagtcatgagcagaccaggcctgggtcccagccaactgctgcagcttgggcataaatatcgacactccctcccctgctccctgccactttgcctttgtgcaagagctgctgattttgcagctcttactttgcagggcaggtgaaccctcctctgaaatgtcacctgggtcatgggtaagggtggatgttgggttaaaattcaagcacctgctcaagatctgtcaaaactgtcctccagccccactctactgcactcactctgaaagctgttcatgggaagcccccaagccctacttcacagggatgtgccactgtcgagtcagagctggacctaggtctgcggcctctgtcccagccaagcagggaccccttaggttttgacttctgggctcggatgcagccaggaggagatactgttcagccctgccctgtgagaagaagagattggggaggcctggcagccgagactgtgctactgcactccagcctgggcgatagagggagactccatctccaaaaaacaaaaaaaaaaaacaagtattatttatgttttgagatgtcacaactttaatttaaaatacatttaaaacctagatttatgttgaatggctgaaattttataggcagtgtgattaaagatgattccaaatttcagcaaggggacatttagttcgggcatgaaaaagaagttaacaagcaaaggtacctataaacaaaggcatcataaatagatataaagccagaagaaaagggatctaaagtagacagagaagataggctgactctccagttgcagattttcattatcagctcatcacaccaccgaaactctctggtgatttgctatccacatccatggcgtttggtggccctaaagattgtaacggcccccatcctcttggttaaaatggcaggtgtgttgacaagaactgtcttaggtaccccctgcctgctgggcatcacattcttcttggtatatattaaaagaacacaagtttgggccaggcacgatggctcatgcctgtaatcccagcactttgggaggctgagacagtggatcatttgcggtcaggagttcaagaccagcctcgccaacatggcaaaaccccatctctactaaaaatacaaaaaaaaaaaaaaaaaaaaaaattagccaagcagggtggcgtgcacctgtaatctcagttacttgggaggctgaggcagcagaaaccaggaggcggaggttgcagtgagccgagatcacaccactgcagtccagactgggcaacagagcaagacttcatctcaaaataagtaaataaatacatacatacacacatacacacacgcaagatttgcaggcaagatgcagcaggactgaggagggggccttccttgctctcccttgccttagcaggcaatctgtcaatgtcagggtgtcctctggaagccaggaggtgtgcctgagtgaggtgctgtccctgaagaagatgtccaggggctggcatggtgagggcagtagtaagagggaggcaaagagtttggccccaggagggtggaattaatgcatctggccagggagtcaatggtcgcacagcagtggctgaggttggaggcacctggcgtcatcctgcctcacctgagtttctgctgcattctctggtcctggcccctgtccgcttctcttcactccccttgccattacctctgtggtctaagtcaccatcatctttctcttggacgtcatcacggccttctcactgtccccctgctgtctatgaattaggatacaagctcatcaaaataaagaggcttaagtacaacacagatctgtttctctctcatgaggaaatctgaaatgtgaacagtctagggccagaaaggcagctcttccatgccagaagcccaggcacagcggcttccttttcccccaccccccgaaagacagggtcttactctgtcacccaagctggagtgcagtggcatggtcatggctcactgcagcctcgacctcctgggctcaagccatcctcccacctcagcctcctgagtagctgggactataggcaggcgtcaccatgctccgctaatatttttattttctgtagagatggagtctcctatgctacccaggctggtctcaaattcgtagtctcaaggaatcctcctgccttgggctctcaaactgctgggattacaggcatgagccacctattccaggcacattccaggcagcagggaaaaggaggcagagacagagaagggcaccacccagcggttgcagttctctcttctgctcacaccccattggccttaacatagtcacttggccacaccttccaaggcaagggagcctgggaaatgtagtctttattctggacagtcacgtgccaataaaaactgctactaataaagggggaagtgaattgggtattgagggtcagctggcagtctcatcctgacacctttcctcggttttcatcacagtagccagagaggtgaaaaggaaagctgaacatgtcacctgcttaaaactcttcagtaggctgggcacagttgtttgcgcctgtaatcccagcactttggaaggtcgaagcaggtgtatcacttgaggtcaggagttcatgaccagcctggccaacatggcaaaagcctgtctctactaaaaatacaaaaactagcaggtcatcgtggtgggcacctgtaatcccagctactcggtaggctgaggcaggagaatcgcttgaaaccaggaggcagaggttgcagtgaggcaagatcacacctctgcactccagcctgggcaacagagcgagactccatctcaaaaaaaaaaagctcttcagtgagctattatggactgaccccacctgcctctccagactctttttctcctactcttttcatcatttgctccactccagatccaatggtctttttttaattccttgaacatccatgctccccactaccttaagattctgcccacgccatgccctctgtatggaacacgcttccccaccattctcccctcctcttgttctcaaggtccaaggcctcgccagttcctatgcacctcttaaatctctgaaccagttccatgtccttagggaagtcttacccgattcccctcaaaaggttagattctgccatcatatgctcccaggacgcctcatacttatgcggtacattttgtactctttgtaaccatttcataattatttaaagtaattgatgtgaattctgtgttccccaccagctgtgtattccaggagggcagagaacatgtccactgtgttcactgctataactggcacatagtaggtgatcagtaaatcgttgtttcttgacggttgatgatcttgccctacgaccccatccatggtaacaactgccttctggaatttctaactttcaggaaactgactttgtttatgtgcctttgactttattagaaattaagtaggttaacgtcgtccatacaaaacaggatgtatttctcttatctgcagaactctagaggttagcaatccagggacctcttctcgacgaagagctcagattcctgccagcacttaattctcacctcctattttacagacctcaatttccatttactgcattttcttctcctcaaatcctggtttctggttctgcaacctcagccgggtgcctggactctgacccattctcctcatttgctagatcctctagtctggcatgtttgccctggattattcctccacgctgtacacatacctcctaccacctgtattgtgaattaccagccctgctccttagcagtgtcatttgtgtgttgggaggacaggggagtgtacctttttttttttttttctcaaagagtgggcattctgaatgttctcattcacattagtgtcagtgtgtttaactagaccagcattcccacctgagggcagccccatcccttggatggataggggggcgcattagaaactaggggtggggccaggcatggtggctcacgccagtaatcccagcactttgggaggctgaggtggcagatcacttgaggtcagggcttcgagaccagcctggccaacatggtgaaaccccgtctctactaataatacaaaaattagatgggtgtggcagcgggtgcctgtaatcccagctactcaggaggctgaggcacgagaatcactcgaacccaggaggcaatggtcgcggtgagccgagatcgcgccactgcacttcagcctgggtgatggagcaagactcagtctcaaaaaaaaaaaaagaaagaaaagaaaaaaagaaactgggggtgggtgggaggcagagattgcattgagccaaaatcacaccacttcactccagcctgggtgacacagttgagactctgtctcaaaagaaaaaaaaaagaaagaaactgggggttggggtagttggttgtcacatgaagggaaagcactgtttgcttttagaggccgggccagcaataccactcaacccaatatgttggacagtcttgtacaaagtggaattgtcccacccaaatgcccaccacactgagtccctgagagatgtcagtcagctgagcagtatttatggatgccttgtgcacagcatgatccaggtttcatgtggtttgctcttaattaaaatacaaaacaaaacaaaacaaaaaaccactttgttaaatgtatggctttttcttactcgtgttttaggggaaaaatgaccagtacatcaaaccagtgatgtcataggtaatgatgcccaggatgaagcgtaggtttgtgaaagagcatcagtgtaaagataaatgaggaggccaagcgcagtggctcatgcctgtaatcctagcacttttggaggctgaggcgggaggatcacttgagcacaggagtttgagaccagcctgggcaacatgacaaaaccccatatcttcaaaaaatacaaaaaaaaacaaaacaaaattagccgggcatggtgatgagtgcctatagtcccagctacttgggaggctgaggtagaggatcaattgagcctgggaggttgaagctgcagtgagctagctgtgatcacaccattgcacttcagcctgggtgacagagcaagaatatctcagaaaaaaaaaagactgagaagttagtgaaagtggggactcctctatggctaaatccgtgaaggtgcgacatgaaggagcatggctgtatccgggtgagtgccatccactaagaggcctggcaccgtggaaggaatgggatactatttgggatcagaggacctaagttccaattctgaccttgattcttctgagctctaagaccttgaaggaggtatttaacttggctgactttccacttcttcgtctgaaccagatctcaataataactgacatttactgagcactcactacataccaggcactgttctagctggcttgtatgtttcactttatttaatcctattatgatccccattatactagtctgctcagtctgtcctaataaaataccatggagcgggtggcttacacgacagaaattttctttctcccagttctgcaggctggaagtccatgatccaggtgctggcaaagttggtttctggtgagggccctcttcttggcttgcagatggctgcatttttgctgtgtcttcacccggcctttcctcaatgcatgtacatggagagagagccagagagagaaaacagctgtctggtgtctcctctaacaaggacaccaatcccattgggttagggccccaccctgtgacctcacttaaacttaattacttccttagaggccctacctctaaatacagccacatagggaggttagattttcaacatatgaattttgggaggagacacaaacgttcagttcataacatccattttacaaatgaggaaactgaggcagagagtggctaagtgaacagcccaagtcacatagttggcagtggcaatattcagacccaggtggcctggctccagagaccctgcccttacccatggtgctgtgttgcccctgccagggacagtgatgtccgtctggtttgagaaaaaggattcccagtaagaatttaggagctcgtgcagtgccgcagacagtggactcaaaggaagaaaagaaagtgcaagggaggctggagtcactgagaagtgtggtggcggaaagccaagatctgacaccaggaggaggaggaagtcccaatgttcatggagaaaacaaatatttttcatctctttgggtttttctgattttgtttttgtttattttgttttgtgtgtgtgtgtgtgtgtgtgtgtgtgtgtgtgtgtgtgttttgagatggagcctcgctctgtctctcaggctggagtgcagtgctgcgatctcagctcactgcaaccttcacctccctggttcaagcaattctcatgcctcagcctcccgagtagttgggaccaccagctgatagctcctaaagccaccacacctggctaattcttgtatttttagtagagacagggtttcaccatgttggtcaggctggtctcaaactcccgacctcaagtgatccacccacttcagcctcccaaagtgctgggattacaggcgtgagccgccgcacctggccaagatttttcatgtctttgtaagatgaaaaatcgaattattagattcctctgctgtgagtttgcatagcaccttatgcaaagtaaaactcacacaaatagcaacaagcaaccacatgaacacgacagcatccttcactccccgctgaggggatgaatcgcctggaggtgatcaaagcaatgtgcaagggatctgaatgcaccttctagaaaagacatgttactcccacatgctgagtgcacatgtgggagtaacaagcacaatcccgatgggagctagtgtgtcctgcatgcgactgtgtgcctggcagtgactgaagggcttgtctgtacccattcattaacccttacaacaaccacagagggcaggtactgttatgtatccccatgttagagatggggaaactgaggcacagagcggttcacttgtgcgacagctgacgcatatcaagctcttcttttgcaccaggcattgcgcatgaaccatctcaccgcatcctcacagcagccctgcaaaggagatggttttttcaatctccattttacagatgaggaaactgaggcccagaaagatccctttcccagggtcacacagctagtaagaagaatgtggagatttgatcccaggccaaatgacttctctgctaatgtctatctttcatggagaatagagtttgagatgaactaggaagtggagaacatgcatcaactgaatggatggaagaaaagagtctttcagggggccagccatggtggctcatgcctgtaatcccagcactttgggagaccaaggtgggcaggtcacttgaggtcaggagttcaagaccagcccagccaatgtggcgaaatcccgtctctacttaaatatatatatatatacatacacacacacacacacatatatatacatacacacacacacacatatatatacatacacacacacacacacacacacacacacacacacacacatatatatatatatatatatatatatatatatatatatatatatatatatatatatattagccgggcatggtggtgcatgcctgtagtcccagctactcgggaggctaaggcaggagaattgcctgagcccgggagacagaggttgcagtgagccaagatagcaccactgcactccagcctgggcaacagagcaagactccatctcaaaaaataaaaaaataaggaaagagcctttcaggagaaacaaggtaacgctaaagatctttggcaaaaggtatccctagcctgacgcaggaatggccaggcattcgggcaggctggaaggggagcatttcaagatgcagccagggctttaggaaagaccatgccggagagactcagaagttgctgaaatcagggcagccatggctgcttgcctgacacatgagcctggttgctaaacgtgtgatttatcctgatagctttaggagccatcaggaaaataatatgtcactgtgttaacactgaactctctccaaagcatcctgcccaatggtcattaatacaattcaggccacagcctctttagcgctcttaagataagttaaacacttagcacaagagatgtggcccaggtttccctcccagggagtagactcctctctggctagtctggaggcagcattaagcaatctcacttgaaaaatatacctgcctcagaggagaaggagcagccaggaagttcatcggggccctgatgagcatcatttttctaacgcaaatttgtcaacaatttctgcattcatgtctccaagcagccaaagacaaaaagtaatggaatcaaaccacagcaggagagtttgagaaaccccagctgtcaccagctcaatcagaacaggttttgataagtatttgtcactgagtttactgatcagcaacgtgcaacaacagtaatactaagtatcggctggggatggtggctcatgcctgtaattccagcattttgggaagctgaggagggcagatcacttgaggtcaggagttcgagaccagactggccaagatggtgaaacctcatctctactaaaaatacaaaaattagccaggcatagtggtgcacgctgtagtcccagctactcaggaggctgaggcagaacaatcacttgaacccaggaggcggaggttgcagtgagccgagattgcacaactgcactccagccttggtgacagagcaagactccgtctcaaaaaaaaaaaaaaaaaaaaaaaaaaagagtactaagtatcatacctgtgggatgcagaagggcagtccagattggcatttacagtcctaaatgacatttgttagaaaaacaggaaaattcataagaataattggaaagaccgttaaaatagataaggctttagcaagcttaatcaaaggggaaaagagagagatcaataaacaacatccagaatgaaagggtggacattactaaaatccaggggaggttgtttcttttaattacaagaatgccaggcacactgttttaccaatgaatttgaaaatctaggtgagattgacacttttcaggaagacacaaattactgaaattagcccaagtggaaataaaaataaatacaacaaaccaaagatcatgaaaatttgttaaatcattaaagagaaagtgcgtttttggtgcccccaccaaaaaaggcaccaggtcccactggttttaaacaagagttccaacaaaacttcaaggaaaggataaatctcatccagcataaactacagagcaaagaaaaagatggaatgctctcccacacattttataagactaacatcaccctaaagctgacactggagttacagcgcatatgacaaatggacaaattgcggtcgtcgctgctgaagttggaaggcccctgcgatcccagcacctaccttcatccatgccctgtgactctttacagaagttttctgcagatcctgtctgagctttagtttccacactggtgaaaagaggggtctggactataattggtatcatttatttgacacctgccccttgcctcgtaacacacctgcaagcagatagaataaccatattttgtaattttttaaaaaacactgaagactgtctgggtgcagtggctcacgcctgtaatttcagcactttggaaggcccaggtgggtgggattacctgaggtcaggagtttgagaccagcctggtcaacatgatgaaaccccatctctactaaaaatacaaaaaattagccagatgtggtggcaggcatttgtaatgccggctacttgggagactgaggcaggagaatcgcttgaacccaggagatggaggttgcagtgagccgagatcaccccactgcactccagcctgggtgacaagagtgaaactctgtctcaaaaaaaaaaaaaggaaactgaagaccttgctgtgttacctgagcccaggaacgatgacacccttgtagcaatgaggatactcagataacagtttctaataccacgctgcaagaaaaaggaaccagagctccatggagaaatggctgattctagggctgggccaagaactatatgattatcccagagcatcttttagcaccgtaaagtaaggaattgctcaggaaaacccaaagtgatacgttatgccagaggaacacaggatccaactgaaaagagttcccaatggccaaatccagaaagataaaaagaacaacaaaataaaacaaaagctggagtaataaaataaataatataatatcagatcccaatggccaaatctggaacaataaataaaaaggagagcaaaataaaataaaagctggaataataaaataaataatgtaatatcagattctaacccaaagtataaaataagtatgtatgagtctatgctgatgtagataaatgattgcataaataaataagtggggagactaaacaaatctcccacacagaaaaattccaggtaacttatgtagatactacacccatagtgtgagccacgcatagtgacttctttccaaagagtacaatatagatgaggggaatagtaacttcggagtggagaaccctgatgaagaccacctgagccaggtgatcaaggtcaacatcaacagtgattagtcatgttgataatatttacccttgatgtgatatgaagagaatggcactccccatctgtgaccttcccaaaacccaggaacccggtgtcatcatgagaaaaacatcggaaaaatcccagttgacaaacattttacaaaatacctgaccagttctccttcacaccgtcctcaaaagcaaggaaagcctgagaaactgtcacaaaccagagaagcctaaggagacaggacaactacgtgtcatgtgatatccaccttggatcctgaaacagtccaagaacagtacagggaaagccttaaaaatctgaataagtaattgacagtagttaacacagcactatctgcttattagttttgacaaatgcagcatactaatgtaagaagttaacaaaaggagaaagtgggtgtggggtgtatgggaactctctgtactatctttgcaacttttctgtaaatctaaaactattccaggccagccacggtggctcatgcctggaatcccagcactttgggaggccaaggtgggcggatcacttgtggtcaggagttcgagaccagtctggccaacatggtgaa[140 bp omitted]gggcagtgtagtgaggagagggtaggagatgaggtcagggaggtgatgaacctgagggtgggcagaccacatggagccaggttccactgtgaggactgtgcttttatttggagggaggtgatatccattgtggggatttgagcaggagcgggacgtgatctgacttagggttgaacaggatccctctggctgctggctggagactaggctgggaggataggggctagataaggataggagcaggaagagtgaggaggtgactgtagtagcctacaccaggggtcaacaaacttctgtaaaggaccagatagtaaatatttttggctttgcacatcatagtggacctgtctcagctactcagttctcctgcagtagcacaaaagctgcagcagacaggatgtaattgcatgaacatagatgtgttctaataaaactttatttacacaaacaggcgacaggccagatttggcccctgggttatagcttactaacctctgatctaggtgggagatgatggtggtttggaccacggtggggcggggggcggtgcgggcagtggaggaggtgagaatggtcagattgtgggtatatgtcgaagggaaagccaacaggatttggtgatggatgggtggcaggatgtcagagagaggagacggggataactccaagacacatgcagtgcctaggccagtgttgggaacatagaaggtgatcagtgtgtacgcatcttgaatcagcaatttggtatttcatgcctctttgccttgtcttttccagtgacatgataggcactgtgagggcaagagccagatttcatccttgaagcctcccctctctttttttttttcaagcttaattcactttatttttcttgtataaaaaccctatgttgtagccacagctggagcctgagtcctctgcacagagactctgatggggtcttgacaaggtagtcagtgaattcctgacctgaattcctgaattctagggagacttggtgaatacagtctccttccagaggttgggggtcgggtagctgtaggtcttagagatagcatcaaaggtggccttggcgaagtttcccagggtggcagtgcagctgcggcgtagcagtcatagatacccgccatcagcagcagcttttgggcatggggaccgagatgatgccagtgcccctgggtgcagggatgaagtgcaccagcacagagccacagtggcctgtcaccttacaagggacggtgtggggcttgccgatcttgctcccccagtagcctctgcacatggggacaatggagagctagcccaggatgatggccccgcggatggcgtggccacctccttggagcacttaacacccagatcgacataccattatagtcaccgatgacaataaatcccttgagcctggtgcgctggctggcgtgggtctgcttttgtactggcatgatcttcaaaacctcatccttgagagaagcccccaggaaaaagtcaatgatctcaaactctttgatggccaggaagaagagatagatctcctccaggaacttgatcttcatgtccttgaccaggtggcccagcttggggatagacgtccactccttgtccttggtcttgcctctgtgagctcctcggccttggcccgggccctgtccgcggctatgaccccagcccccgatgcccctgctgaagcctccacagaagccaccgtggttccccatcccagggtccccagggcctccagccccccatcccccaaaaccggatgttttcttggagaagaaagaagcttcccctctcttgacccatcattgtctgatgcggtgccgggcccatagtaggtgtttttatagtcttgggatagacagatcttctcgagcacaggctctgaaaggagatgggtccgggtgctggctcctcttcccctcgccttgggcacatctgagtttgcttgggctgccattacaaagtcccacagactgggtgccttaaacaagagaaacttactgtcccacagttcatgagacgagaagtccaagatcaaggttggttccttctgagggctgcaagggagaatcttttccttgcctttctcctagctcctggtggtctcggatgtcctctgactcgtagagaacatgtcacccggtctctgtcctcgtcatcacctggcattcttcgtcttctgtctctgtgtccaaataccccctttataaggacacagacatattggatgaaggcccacgctaaggtcctcatcttaatgtgatcatctgcaaagaccctatttccaaataaggtcacattcaacatcttgtaggggacacagttcaacccataacaggcatgttcctacactcctctctgcctcgttttctcctagtttcccactacatatatagaaagtgctggccatagtccctggcacattgaaagcttttaataaatactagtttctatccctagtccaatactagtttctgtccagtgatagagatttttgtctctatctcactgagatatttgtaattaatttttttcaaaagcagtacatacacacattatccttttttttttttttttttgagacacagtctcgccctgtcacccaggctgaagtacagtggtgcgatcataactcactccagcctcgacctccccaggcttaggtgatcctcccacctcagcctcccaagtagctacaactgtaggtacatgtcgctacacctggctaatttttgtatttttggtagaaacagagtctcaccatgttgtccaggctggtctcaaactcttgggctcaggagatgcaccctctttggcctcccaaagtgttaggattataggtgtgagccaccacacctggccctcattttttttaatgaaagtatttcaataagctaaaaccttctttgatcaccagcccaatcccagtgactccccatatgaaactgctgcttccagccagatgtatgggcttccagatctttctttttccagttatgtacaatatatccatataaaaatctcatattttaatgggattttataaatatatacatggcatcatactgggtgtatcactcttttttttttttaaacagagtcttgctctgtcacccaggctggagtgcagtggcgcc[131 bp omitted]ttcactatgttggccaggctggtctccaactcctgacctcaagctatctgcccaccttggcctcccaaagtgctgggattacagatgtaagccaccgcgcccagccggatgtatgattctttaacctgcgtttttcacactccaggatgtcttggaaccatttccatgtgctagcataaaaattcacctccttggcttgggacgtggctcacgcctgtaatccccgcactttgggagtccgaggcaggggggtcatctgaggtcgggagttcaagaccggcctgaccaagatggagaaaccccgtctctactaaaaatacaaaattagctgggcgtggtggtgcatgcctgtaatcccagctactcagaaggctgaggcaggagaattgcttgaacctgggaggaagaggttgcagtgagccgagactgcaccattacactccagcctgggcaacaagagcaaaacactgtctcaaaaaaaaaaaaaaaaaaaaaaaaatccacctcctttttctgcactgctgggtaggattccactgaatggatataccacattttatttagctacgacctcatcaagggaactttaggtgttttccagtttctcaccaggatgatggacatttttacacaaggctctttgcaggtgttactctgggtcagaaagtaaaaatccctcgagacggggattgcaccaggtcccggtcctcagccccactgcacttcacctgtgtcaaggccacgggaacccttccaccgtctctgccagcagatgccattcagcacccaccccaagatactcatactttgacccggaagagaccagaagcaccctgcagttcgtgtggacaagtctcccctctgacttacagtcccctcaccctcgtacctaggagagggatggcagcgctgagggtcgtgggattctcttccctggaggctcccccatcctcgtggcctctgcgcggtccagctcccctccgagctggctcaaggggtaacttgatccaggtcagctggtggagtatgaggtagcgtctagctgagcgtcacggtattttattaagtccgaaatgtgattgctactgttgtcacactttagcgcccccaacaatccccttacaaatgagaaaaacagagcctccccaaatgcctttcctctgacatcaaggaaagcgcatggaaccctgcccagaggcctgagcccgggtgaccccaggagtggctccagagcttgaggaaaggcctggggggcggagggggtgtttttccagtttcaggcaaagcagtgagctgggggctatctgctgtttcctctgcgcctgggtctgtaaagtcagcggttgccgtttaaatcccattttccttaacatgtcaggattgctcattctaggccatccatttatatggccatggctcagaggtctcagactcacatgcctaggggggtcaaggatccaggtaacgtaaactgaagcaagccccgtagagatggtgggaaactgtaaatggatgccctggctgaaggaggtagctgaaaatctggagagagaacaagaacaagaagagaaagggaagaggaggcagagagaaaagagagaggacatcccccaagtttacatattgcccattgcttcaaaaaaatttaaacatgcaatgagctaagtagatatgtctccaggccagtttgcaggctcttccctaactgaacttatcaacacagtagacaagctgccggcctggctccctcacccctctagagcagcgctgtccagtagagatttctgcaatgataaaatatctgcagcgttcactgcaataaccactggctacatgtagctcttgagcacttgaagtaggactaaagaactgaacctttaatgttatttaactttactgaatttcaatataactataactagccacaggcaactaattgctaccatattagacaacatggctctagattctttcaatgtggagggtatcatcgtgcttgactactgcaaaaaagatcactccttcttggggagagggggtagattatacctgagaccaccaagcattaatcagagtcctgggtaaatggaaagaaaggaaattcgaaatactgagcagtaaaagcttaggtgtaaccagatgtctgctggctcaagagtggtcactcagtgtccttccactcccccacttcccagtgagtttctcattcagggtcaccctttagcatccactgtgttcttggccatctgcttactcccatttgcccagagctgacccctaggaagccacctgggggtacttccctgctgccgttggtctccaggccttaagagcacaccactgtccaaacccagggtgctgcccgtgggtcacagaggtgcaaggtcctatgcagaggcgagaacggcagttgcactttgtcacctgccacaaagttgctgtgcctgggcccatgtgtgtcaaggactctggaaacaagcctcacctttcatcaaaaccctttctaatctgaggccctttcaaggggctggagagggaccagcagccacactacccccttgccaacccctctctcagattccagcccagctccccacagggcaacccaggctgccccagatgccactgacccctctcttgcctccctaaacatcaccataacaacaagactaccttacgtatcttttaaaaattaatgaggaggcctgtaattctaccactttgggaggccacagcgggaggatcacttgagcccagaaattcaagaccagcctgggcaacatattgagaccctatctctatttttcaaaaaaagaaaaaaaatgaatgaggcaggggcttcccaccatccccctgcaaagcttatattctcaaagataaattcaagccttttggccaggcacggtggctcatgcctgcaatcttagcacttcgggaggccaagactagaggatctcttgaggccaggagtttgagaccagcctggccaacatagcaaaacctcatctctactcaaaatacaaaaattagctaggcatggtggcacacacctgtagtcccaactactcgagaggctgaggcttgagaatcacctaaacctgggaggtggtggcagtgaactgagattgtgccactgcactccagcttgggtgacagagcaagactgtctaaaaaaaaaaaaaaaaaaaaaaaaaaaaaaaaaaaaaagctttttgcttgtccaattgtctaaaaagagatctgttcaaaatgttgcaaataccctttcttccaatttctctactcccatcaaggttccagagatgttacaaccaattttttctcagtagtcaagctcagagtcccacgtgcttctcctcctccagcagcctttgtaaggaggcagctgcctcgagaaatcaccttgcaactaaactgtgggaaaatgtgtaagatcttaacacagtggtagaaactaacatgtatgcagtagccactgtgcacccgacactgttctcggtgctctcatgcagcatctcgcttctcctcacctcatctggaggtgggttcagttatcaggtccatttatcagtcaggcctctggggttcatgagggtcatgcccctcactcaaggtcacacactgggaagcggttggatccaggatccaggcccaggcagtcagattccagagcctgcaccctgaaccagtaccgcaggggctggcacccccgcacattttttgccccatcaacatattatcatgtcactccgccagcatcatgaagtgcactcatgatatgtttgccccatcagcgtgtcacgagggcatttcatgatgcaggcggggttggcaggtgtgcatcgtgtaggctccacatgggacatggcatcccttacgactcttggctgcaaagtgccagaaacccagctccactcacttaatctgaaaagtgggtgtatttgttcgccagggctgctgtaacaaatttcccccagttactggcttcgaacaacacacacgtgtcctcttacagttctggaggtcaggctctgagaggagaatcggtttttttactttttttttttttttttttgagacagagtctcgctctgtcgcccaggctggcgtgcagtggtgtgatctcagctcactgcagcctcctgcctcccaggttcaagctattctcgtgcctcagcctcccaagtagctgggaccacagatgtgcaccaccatgcccagctaattttttgtatttttagtagaggtggggtttctccatgttggccaggctggtctcaaactcctggcctcaagtgatccacccgcctcagcctcccaaaatgctgagattacaggtgtaagccaccacacctggccctttggttttttgtttgttttagtttttctttcagtggccacttgtgtatgttgactgtggtctcttcttccatcttcaaagcacatgactccagtcaccctctcctttctgtcatcagatcactgtctctcttacagggacccatgtgattccatttagggcccaccccgacagccaaggaaaaacttcccacctcaagatctctaactgaactaaagtcctgattgccatttaaagtaatagatttgcaggttccgagataagaatgtgcgcatctttgggggttcgttattcggcccagcacagtcagggatggctcagcttcagtcctgactggatccaggggatcagatcgcatgctcatggcatccccctctccagctcgcagccctgctttcctcagcagctcccggcttaatccaccattcagcagccccagggaagagacagcacctcttccaaaagtgccagccaacgtccccgggctggttcccattggcccaccttagaccacatgttcatccttgaagcaatcactgtggccagggggaccttgggtccctctgattggttttcattgtccccaccccgtagtcttttgtttttttgtttttttgttttttttgagacagagtcttgctctgtcatgcaggctggagcacagtggcgcgatctcggctcactacaacctccacttgctgggttcaagcagttctcctgcctcagcctcccgagtagctgggattacaggcagctgccaccacgcccagctaatttgtgtattttagtagagacagggtttcatcatgttggccaggctggtctcaaactcctgacctcaaacaatccacccgcctgtctcccacagtgctaggattacaggcatgagccaccatgcccagcctccaccccatggtcttgtcccacagagagaggtgtttccccaaggaaactgagtgggaaacagcatggcattggagtttgttcaatggcaagccctggggatagtgcctggcacatagtaagtgctcagtaaatgatgatcacagatcatgaggcacagcaggtgtccctccaggagccaatacttgaagagcacagggtttactaagcagatgtaggcaggagagcatttcaagcagggggaacacctttagcgaggcagaggtgtccaccatatggccagggtgaccaaatgtctggccatacttgggaagctggggacctaggggagtcctggtttgaacctatccccctagtataataccatccccctttaatgcaaaactctctctgtttggagagtatctgtatggtcactttccttgcagtcaacctgctcatttataaggaaaccaaacagacaaagaggatgagattgaacccaaggacctctaaccttgagtatccaaatccagactagaacccgagcctgatgactcccagtgcagtgctcatcccagccctcagcttatgaggccaacccttgaaggctacatcagattaaccaggcatgttctctctctctctctctctctgtcaaattttccataggattgtgaccagatccacgttgatgacgtctcatcagatgacaatggccaagatttaaggtgggaatttggggagtcaaaaatgcccattgattgattgattgattatcaagttatccttctactaggaagtggggtgggagaggagggctgcttataaggacaaggagtgcctgcctccagccagaactgggacttttgcatctcagactcaaaaatcacaactaggcgggtgtggtggctcatacttgtaatcccagcactttgggaggtcttagcaggaggatcacttgagctcaggagttcaaaaccagcctgagcaacatagtgagacccccatctctactataataaataaatgagtaaaaatttgtttaaaaaatcacaacctcacccctcaaccctacagtctcttgctcatcacctcaaatcactaaactctgctcatttattgctatttttttcctgcttactgaagtaatgcatgcataacagaaaaaattcaaacacttaacctgacctcacctcccaaactcaccaccattaagagtttagtatatattcttcaaagatctgctcaaaatgttgaaaataccctttctttcagcttctctcctccaatcaagggtccggagatgttataaccaattttttctcagtagtcaagctcagagtttcacgtgcttctcctcctccagcagtcttcgtaaggaggcagctgcctccaaatatttggttgtattcattagcatacatatatatatttttttctttttcttttttttgaggctgactttcactcttgtcacccaggctggagtgcaatggtgtgatctcagctcactgcaacctccacctcccaggctcaagcaattctcctgcctcagcctcctgagtagctgggattacagtcatgcaccaccacacccagctaatttttttgtttttttagtagaggcggggtttcaccatattggccaggctggtctcaaactcctaacctcaagtgatctacccacctcagcctcccagagtgctggggttacaggcgtgagccaccgcacccgaccagcatgcatatatttttaatataacaattgatacagccaatacttaagaaacacttctcaaatgaataagtggtgtgtctggtttctaggggaaaacactcccaggacatggcttccaggaatcaggtaacccattgcttaatatgagacaccttcaggccgggtgtggtggctcacgcctgtaatcccagcactttgggaggccaaggcgcaaggatcacctgaggtcaggagttcgagaccagcctggccaacacagtgaa[141 bp omitted]actccagcctggggtacagagcgagactccgtctcaaaaaaaaaaaaaaaagagagacagcttccagaggaatgtgggctggaatgttccaagcctgcccctgggaaaactttgtaaaaatggaaccatagttaatctgtgctcatccaaaattaccacaattcaacggctttaggctcatcagatatattattagaccaactaatgttttggttacgggatcagtcattgtaactttatttagtagctgcttccaaggtgtctctcccaacttactgcaaaaacaaaaatcaaaatttctgttcctgagccctgcaagtcttttcaaagcccggcacaatcggaagtgatcagccggcagatgcctgcttcattttaatcagccattcggaaaatcccttctgcaatcaggactggcaaggagcaaagctccagccccaccaggacttctcacctgatggagtaaataaaccccagatcaaggttaattggtcctttccatgaagtcatcgttgggaagcactcttcctttcaaggcagtgagcagcaccgttctgtttctatagtttcccctgtagctagctggcttggaattgagagcaacagtcctctgaaccctgtctcatgctgagctgtttggtacctcactttgagaattctcagcccaagggtgttttcttccttagagaccaaattctccacttattcattcaagaaatatttatggagtacctactatatgctaggtcccaaacatgaaatgcctcttgtttgtttttttgttttgttttgttttgttttgtttttttcagttagcagtaagaaccaaccttcagagatgcctcgttttgtgccatgttctattctaaatgcattacatgggataactcattgcatatccacagtaaccctaggagagagagatgcttttatcctcatcctcatttttcagctggggaatgtgaggcatagagagattgagcaattggcccaaactcacatggctggtcagcagggaaggcaggattcaaatccaggcagcctggctctgggacccaagctcttaacagatcctctgtccatcctggacactggttcctgccctccccaagggcctccatctcctaacatctagacatctccccatggtagcatctgagttaatggtgagcgttcactttttcaagaataaatctatggccgggcacagtggctcacgcctgtaatcccagcactttgggagcccaaggcgggtggatcacttgaggtccggagtgcaagaccagcctggccaacatggtgaaaccctgtctctactaaaaatacaaaaaattacctgggtgtggtggagggcacctgtaatcccagctacttgggagggggaggctgaggcaggagaatcacttgaacctgggaggcagaggttgcagtgagccgagatcatgcctttgcactccagcctgggcaacagagcaagactccatctcaaaataaataaaaaaaaataaaaaaaataaaaaaataaaaagtcaaaataagggacgaggcacggtggtgcatgcctataatcccagcactttgggaagccaaggtaggaggatcccttgagcccaggagttcaagaacagcccaggcaacatagagagactccatctctccaaaaaataaaaataagttagccaagtgtggtggcgcacacacgaggagcctgtgggcccagctcctcggaaggctgaggtaaaaggatcccttgagctgggaggttgaggctgccatgagctgtgatgacaccactgcactccaacctgggcaacagcgcaagaccctgtctcaaaaaaataaaaattaaaaaataaatgaaaggcaaatggatgtggatcaggtaagagcaaaagacaccacttttcttggggaagctaatgaaagctgtggtcctgctgccccccaaatgcacactcgcagcaccctgtgcatttcgaggggctcatggacacccaaaagcccacccgtgggtcccacagagcctgtggtctcccagggaagatgccctgcacccccctgcactaacactgtccctcccctcctctctccgcagcacatacaacttctccgctgacggcttccacagttcggccccaggagccaacctgtgcctgggctctggcgtgcacggcggcgtggactggatgaggaagctggccttccgctaccggcgggtgaaggagatgtacaatacctacaagaacaacgttggtggtgagtactgtgagccttgggcctccgaggaagggaaactcattgggatggatgctgtcagtgtccctgctgtgccaggcgccaggcagagaggttcacaagttcagtaccagcccacttaatgcaaccctgacgacacccttcggaatagagcactgggattttgtcaccttcactttgggggtgggaaagctgagggacggaggctgcatctggtccaagatccttcaggccacaaatggcgcggggtggacgtgggggcggaattctcttacccacagccagaggctctcacagtgtggtcctccaagtagcagcgacagcatcacctggggatgtgttgaaaatgcagattctctggccctacctcaggcctagcaaatctgaaactctgcgctggggcccagaatctgtgttttcacagccctggaatccccccttggattctggaattccagaatccccctggaatcgggaggacctgtgccttgagtctttgcatctcagattgttgtccgcagaccaaccacatcagcatcccccggagctggttagaagtgcagggtcaccagcaggcagagtctgcagtgacccaagattacaccactgcaccccagcctgggcaacaaagtgagaccccgtaaaaaaaaaaaaaaaaaaaaaaacgtgcagggtctcaggcctcatcctgggcaactgactcagaatctgctttaaaaaatttttttttatttttgagacaaggtcttgctatgctgcccaggctggtctcaaactacttctggcctcaagtgatcttcccacctcagcctcccaagtagctgggattagaggcatgcaccacctgcctggcccagaatctgcatttttgacaagcccgccaggtgactgtggaggcattaaagttgaagaagccctagaagtcactggttctcacacgtggctctcattggaaccacccagggagtttcagttgctggtggtcttggtatcactgcagcctggacatcaggagtcataaagatccctggggaattctaagtgcagccaaggagagacccgccccctggcttcaggtactaggaacatttgctcattgccccaaacaagaagtctgaaggcactgaaggcgaggctggctcagccgtagtctagagaattctggagttctctagaacagaggtttttaactaggggtggtactgcgccctcctcaggagacatctgggagtcttcctggttgccacagtgcctggaaccaaccactggcccataagggcagggtttgagtaggtggctaatagtgtctgcaatatacacattggccccaaaaacttctagggccccctccctccattcctagaaagaatagagtcccggttctcaaactggacagaacacacttccagtcgcagctctacaactttctagctatgtggccttaggcaacatacatacggtcatcttaatgagccttagtctttaaatctatgaaatggagaatacaaatacttctgcttccctggattattgagagatttattgttagtgcatacaaaaggcatgactccatgcctgatacacagcgggaactcaataaatggtggcatttgtcacgagttgctctcagttttgcttgggagcctcgggttcccctgcgtcttctactgtccctggagctttcccatccgttctttgggacagacttcccgtcgtgttcatggctgcggtgctaatgcagcccacgtgctaagcgcggtcctggcagtagctaatgtttaaggagcactcgctctgccagttttgccaccgttttcatggactagctccttcactcttcacagcatgcctgtaaggtaaatgtttttatcaacggtgttgcttgaaagcagaaactgagatgacggaggttaagtaacctgcccagcgtcacacagcccaggcagaagggccacagtggagtcccaggctgggtgactgcaccacctctgcccttcagggccacacttggtggcctctcagatgtgagtgtgttgattgcaggagtgaagcagcaagctctggtcaggtcccagcctttgtacccagccctgcacggagggaggaggggagcaggagggctgactcaggtgagacagggatggggttggccgccagagagcatctgttccccatccaggttaaggcccaggaaatgccagggctttgtcaggctgctctgctcacccatagctgaggggagagcacccaaggcgtcagccagtgaggagcccacagccagcggcatgccggtctccttccccaacccagctgttcctgcatcacagaactagccaggtgcatggccgtggcttccagcccagggatcaccacagatccccacgattccaagtgttttagaaggtacactcggaagaaaggcatctgcaaaatacagaatagagaaaatgcttagtaaatcaccatctaggaggcaggggttgaaatcaggggccttagcctgatgtcatccttccatctaccacttcccatgtagctctgagcaggttatttgacctccctgtgcctcagtttcctcctcgtgtgcaaaatggggccagtgatgctgcccagcatcattggtagatggctaatagtgtctgcaatatacacaatatacacaaggattcatgccaggatgttgtgaattcacacaggaaaggtgctcagaacggcatctgacacacataagctctcattaagtggcacttttgttatctggggaaggtgggaaggaggccaagcctggaggaaaacgccgaggaaacagcttgaagcacacttcccagcgtggagcaaagtaggggtggttgggcagccagctacacaagacagcacgttgggaagccctttgtcaactgaaaagtgctgagccttgtgagtttgtattgttactgagggttccagctaagggtctgtggggaaggtgcagagacagaggaaaaccagaggccgtgtgttctcctagagttgatagactaatgagaagatgggacatgtagcagtaagaagattcattcattcattcattcttccacgtgtccatcgtcaaaggcctaggttgtggattcagcagtgaacaaaagaaacaaggtccctgttttcaaagagtttatattcagtgagtggaggaaacagaccatcaacaagtgagcaaatcacttaaattctttttttttttttttttttttgagatggagtcttgctctgtcacccaggctggaatacagtggcatgatctcggctcactgcaacctctacctcccaggttcaagtgactctcctgcctcagcctcccgagtagctgggattacaggcacatgccaccatgcccggctaatttttgtatttttaatagagatgaggtttcaccatgttggccaggctggtcttgaactcctgagctcaggtgatccacccgtctcagcctcccaaagtactgggattacaggtatgagccaccatgcccggctttaaattcttaattcagtcatttcgaggatgatcacacctattgaagaaacagatatggcagagagcccagcgtgggcagtggtggccaggggatacttggaatagtagacccagagtccatctctcaggaagggctatttgaactcagtattctaaatattctagatgagattctaataatgataaccagatgcccagagctggggaatgaccaatacaagcaaagagtcaatcagttcagctacattcaactgcataagtaaaagaacaaccaaccaaaaaataacacaaaaaacaacaatggcttaaaccagatagaaatgtattttttttcttatatacaaaagctgtaggcattccaagctggccaagtactctacagtgttatgagcccaggatcccaggatccttctttctttttttttttttgagacagagtctcactctgccacctaggctggagt[134 bp omitted]atagagacgggatttcaccacgttggccaggctgatctcgaactcctgacctcagatgatctgcccgcctcggcctccaaaagtgctgggattacaggcatgagccaccctgcctggccccttctatctttgtatttatttatttatttattgagactgggtctcactctgtttctcaggctggagtgcagtggcatgatctcggctcactgcaccctcgacctcctaggctcaagtgatcctcccacctcagccttcagaatagctgggaccacaggcacatgccaccatgcctggctaatttttaaattttttgtaaagatggggccttcctgtcttgcccaggctggtctcaaacccctggctcaagcgatcctcccacctcagcctcccaaagtgctggggttacaggcgtgggccacctcacccagccaaaatcaggattcttattactaatgagaagatccttttgtatttatatttttactaattacaagtgaaaaaaatggatagtggatggcaactaagtgtctaccacaaacagcaaatgaaaagtctctgagacaaaaagagtttgacacttttcagaaagataaagaaggccagcatagctgaatagctggagtgagggggcacgtggtccaggacaggatgagagagctggcggtgtccagatgacataaggcccagtttggacactgggctcttctatgtagagaagacgatgtctccatagcacaggcagcattttgtcctaattaattcattcttccttcaacaaatactgattgagcatcaagcacaggccagcccctgctacagaaactgctgctatgatggcgaacaagactgacttggtccctgccctctgccctagagtgaatagcctaatggccaaggcagatgccaaacacatcgtcacacagatacacttaaaattagagttgtgagaagtgctgtgaagaagagctacagtgtgttgggagaatataaactaaagggacctgacccagcctggagagatcaggttagaccttccagaacaaatgacatttaagatgaggccgtaaggcaggatgcagaggttcacacctgtaattccagcactttgggaggccaaggcaggattgcttgaggccaggagttcaagaccagtttgggcaacatagcaagaccccacctctatgaaaaatacaaaatttagccggacatggtggcaggcatctgtagttccagctactcaggaggctaaggtggaaggattgcaggattgcttgaacctgggagactgaggctgcagtgagccttgatcacaccactgcactccagcctgggtgacagagcaagatcttgtctcaaaaaaaaaaaaaaaagacaaggcccaaatgcagagtgtgaaggatttagccaggcaaaagcagaagatgagataaaagagtggtccatgttctgaaatgaggtgtgcaaaggtcctggggcaggagtccacttggtgtttcagggaacaaacgaggcctccaggctggaatggaaagacagcggcaggagatgaaactcagtagggacaggatcatgctgctgggggttttgaactttatcttaaagctactgaaggctgagagaatggcaggttgagaaatacccagggtagctctggaagccagctgcctgggtgccggacctgtgtccatttttgttcatatctgtgcattcagtgcctattacaatatcaagcacctagaaggcactcctgaattttttgttggatgcatggatggatgaatgtgggggtagataggtggatgggtggatgggtgggtgggtagatgggtggatgggtgggtgggtggatggatggatattgggtggatggatgggtagatacgtgggtaggtggatggatgggtggataggtgtctattattttctccctatggtgagcaagtcagtcaacatcacaaagcctgtttctttacctaaaaatatagaaataaaaatggtgtccacctctatggtcattgtgagaatgaaataaatcatgttaaaagcagagccctgcacataagcactcaaaaatgttcatcattttttatgttattattaattccctgtctccaccataacaatataagctctataatctgcatatttttgttcatatctgtacattcagtgcctattacaatatcaagtacttagaaggtactcctgaattttttgttggatgcatggatggatggatatggggtagatgggtggttgggtggataggtgggtgggtagatgggtggatgggtgtgtgggtggatgggtggatgggtgggtgggtagactgatgggtgggtgggtgtgtgggtagattgatgggtgggtgggtggatagatggatggttggatattgggtggatggatggatgggtggatggatggatattgggtggatggatgggtggataggtgggtgggtggatggatggatggatattgggcagatggatggatgggtggatggatggatattgggtggatggatgggtggataggtgggtaggtagatagatgggtggataggtgggtggatggatggatggatgaatggaagggtggatgggtggatgggtgaatcagtcagtggatggattaatctatcaatctgttgatctcaggataagattgagagaagccactggattgaagtttactttgggttgtcatctgattttaaccctcagggtacagtagctagattcctgttccctaccttcatcccccagatctttctaatacgatgactacatctttatttcctttgtccacagggttgataggcactcccaaaagggagacctggctacagctccgagctgagctggaagctctcacagacctctggctgacccactccctgaaggcactaaacctcatcaactcccggcaagtggcagccctcattttcctctgtgccactgaactttctcgcagtagacagtggtggctcctgcatgtccacacttgggagaattggactcctcaaactctcacttgtacactttccaaatattttttttttttgatatggagtctcactctgtcgcccaggctggagtgcagtagcgtgatctcggctcatcacaacctctccctcccaggttcaagcaattctccggcctcagcctcctgagtagctgggattgcaggtgtgcaccaccacacctagctaatttttgtatttagtagagatggggtttcaccatgttggccaggcttgtctcgaactcctgacctcaggtgatccacccgcctcggcctcccaaagtactgggattgcaggtgtgagccaccactcccagcccaaatatttaataaagcttaagtgcacaaggctcagtggataccttggagcatagctgagctaatagcggcagagacttttcagggcccaacaggtttccaggtttctggattctcccaaaagatgagaactggcatgcaggctccagcttactctattccccacctctccctcttgtcctacacttgttccatatcactcatttacattacccgcaactatttaagtgtatggcccttgcaataaacatttgctttttatataagaaaagtattccccccatactacatttcactatgtcaggcagcttcaggcttaaaagagaggaacagcctgagaatccttgggccctaacatacctgaagatgacagccatagcctccaagcctaccagatttcccgccaactgcaggctcatgcagcaagaggaggcctggccttgtggtccctctgagttctgatccacagtctcctttgtccttaggcccaactgtgtcaatgtgctggtcaccaccactcaactaattcctgccctggccaaagtcctgctatatggcctggggtctgtgtttcctattgagaacatctacagtgcaaccaagacaggtagggagaagccacacctcggcggggatacagggttggagggtggggttagctttccatcctgggaatggggtgtttaaggaacatgacaccacagaaatggatggagtgtgcctatggccatgactcagattcccaaaacagcccccatagaccacatgccttaacctctgcttctaaagaaattggttaggaccacagttttccaaagtgtctgtatgagttcagatacaggcaaagctgctgtaacaaacacaccccaaatgcaagggcttgcaaaagagtcaaagctgatttctccctagtagaacagacagaggtgagtgatccaggctggtggggtgaccctgtcctcagagacatccagaaacccaggtctctcccgttttatttttccaccatttcttatggttttattctcatgtatggggtcaaatcagagtcctagcccatcctcattctagcaggtctggtatttgaaggccaagctcagaaggctatgtacattacattctactcacttcctgttagccccagcttagtcacgtggccacaagtagctgccagggaagctgggaaatgtagtccatagctgagtgattcatactgtcactcaatctggaatgcagtggcgagatcatagctcactacagcctcaaactcccagcctcaagcaatccttccacctcagcccccaaagtactgggactacaggcatgagccaccgtgccaaaatatttttaattagaaaccttttccattgttttttctctagagcaaaaaataaaaaaaataaataatttatagtactttggcagcattttcttggagcaattttggttttactgaagttctacgtccaaacattatatgaaagtgccttttgattttaaaattatagtagtaggggccaaaatggttgttgaagatttttcaacaagatcctgtcttttcatttttcccatttttcctgcatacctcaagtacctttgcaggtttatttcgaatctcttttttaaataatatttttatttttaattgtggtaaaattaaataatgtaaaattttcaccatcttaaccttttttcttttttttaagatggagtttctctcttgttgcccaggctggagggcagtggtgcaatctcggctcactacaacctccgcctcctgggttcaagcagttctcctgcctcagcctcctgagtagcaaagactacaggcgtgcaccactacaccgagctaattttgtatttttagtagagacggggtttcaccttgttggccaggctagtcttgaactcctgacctcaggtgatccatctgcctcggcctcccaaaatgctgggattacaggcatgaaccaccgcacctggccatgcactatacgcttaaaaatggttaagatgggtcaggcgcggtggctcacgcctgtaatcccagcactttgggaggacgaggcaggtggactgcctgaagtcaggcagttcaagaccagcctgaccgacatagtgaaaactcatctgtactaaaaataaaaaaattagcagggcatggtggcgggtacctgtaatcccaggtacttggaaggctgaggtaggagagtcgcttgaacccaggaggcagaggttgcagtgagccgagaccaggccattgcactccagcctgggcaacaagaacgagactccgtctaaaaaaaaaaaaaaaaggttaagatggctgggtgcagtggctcacgcctgtaatcccagtactttgagacactgaggtgagcagatcacttgaggccaggagttcgagaccagcctggccaacatggtgaagccccatctctactaaaaaatacaaaaattagccaggtgtggtgatgcgtgcctacagtcccagttactcaggaggccgaggcaggagaatggcttgaacccagaaagtggaggtttcagtgagccgagatggcaccactgcactccagcctgggtgacagagcaagactgtgtctcgaaacaaaagtgtccagcgcagtggcatcaagtgcattcaaatggttgtgcatccattgccacttctacatcggacagctgcagagacttgggagcctgctctaacccctgcgctgcctcctcctgctgtgttgccctgggcaagctactgaccctcgctgtgtttccggctgtcatcatccttcatgtggggatgataacagggctcacctcagaagtttgctcaagaacgaaatgatgaataccgggcctttgggagcacagctgcaggcaccaagctcttaatgagcgggtattggctgcaatccggggtcctcacagagcgttttttctttccttcctgtgtgcgtgcagggaaggagagctgcttcgagaggataatgcagagattcggcagaaaagctgtctacgtggtgatcggtgatggtgtggaagaggagcaaggagcgaaaaaggtacttcttccacctctcagactgcgttttcctgctctttcgagcacccctcgtggtcttcaagggctccttccatgatttcctccactccccgtggctggctgggtcctccttcccaggctccttgcttgccagtccattccatttgcaaattgcagaagcatcctgagtaatttccttctacaaatccccctctctgcctctggctgctgcccctggtagccctggattgtttctgggacaactgttcgggagcctagagacgctccggcagggcaggctggtggggggccagtgcacgtgcatgtgttttatttaatacttactgatcatatgttccagcaacccttcccagttaataaagacagcattaagctaatgaaaaagaaaatcctgcatttgtgatctcgggcccgtgaggagagggcagggggttctggtggccacatctctgttcttggaaaagaaacagctgccaaagtcctgggtctggatctgtcaacagcgccccagagaggctgccacccccaacccggaggcctgggaagtggattgttaatgtcacagaccttaattagggggacctggtttcccccatctctgcctggcagcaaatcccaaggaaatgcaaaaatgttcagggtctcagcagatgaaacccagaagaagagggaagccctagggtcctgggagagggccccgggagagaggagcttggaaggctttgcaggcactgttccctccacctggaaggctcctcccctttcctgggagatgtagtctctattatccgccgccatgagccccgctaagaaatgggagctgcttctgagagagaaggggagaagtgatattgaggggcagctgccagggtcagtcgcactggtgtgtggccaggctgtggctggcatcttgagttgctgacctaaccccatgcccttcaccaccgtaactttattgctaacatcatcattgtactcaatcctccaaaaactcctacaaagtgggtatcattgcatccctttttttttttttttttttttagagatagggtctcactctggcacctaggctggagtgcagtggcacaatctcagcttactgcagcctctacctactggactcaagcgatcttcccacttccacctctaagtagctggagctatggacaggcaccaccatacctggttaattttttgtatttttttttttatagagatggggttttgccatgttgcctgggctggcctcaaactcgtaaactcaaacaatctgcccaccttggcctcccagaaagctgggattagaggcatgtgcccggccacaccccattttatagatgacagaatttgagactcagaaaggttaattaatttgcctagggtcacacatctagcacatgcaaacctacctgtgtcatgctccaaacgcctggcagggaggagacggacttacgagtttcaaacacggttggttttcacccctgagctagtcaggcaagagtagagtcagccaaagaagactaggtacacacccaccacacacagaactcccataaaagtcccagtgtctgaggcagaagcctcagaacgttagtgagaaacagtgtccaccagcagctctctcagcctgacaaatggaagtcattagcccaggccaccggaaatctgagcggtgtaaaatatggccgcaggaccaggggccttgactgtttccgctgacagtgttgttaatatctccattttagtgggtgatttgtctccacctcttcacgagtgatgaatccactggcactctggaacctttaagcctggggtaaaggcggctagaacattctctttcttccacctttgctcattctctcccagaaaaatgaatcacactcttttttttttttttttttttttttttttttttttttttttttgagacagaatctcactgtgtcgcccaggctggagtgcagtagcatgatctcggctcactgcaacctccacctcccaggttcaagcgattcttgtgcctcagcctcctgagtagctgggattacaggcatgagccaccacatgtggctaattttttgtaattttaatagagacggggttttgccatgttggccaggctggtctcgaactcctgacctcaggtgatccgaccacctcagcctcccaaagtactgggattagaggtgtgagccaccacactcagccaaattacactctttaaagagggcaggattggccaggtggcaaccagaatctatctttgcaaagaaaggagggcttggccgggatgagggcagggtgggaatgctagggcagtgagaaggcgttgaagagatgagagctgttcccataggagatggttttctgcttcccttgagctgagaattgtttagaaactacagaacaaagagaaaaggatacattcagaggactttgcttgagaaacttaccttctttttttccctctctctcttcctcttttcattccttctacgaatatttcttgagcacctactatgtgtcaagagccatgcggtgcagcaatgagcattgcattccaagctcaaccttcctggggcctttgcacttgctgtgtcttctacctgcccccacgttcccccacatctttgccagggcctgcttaaatgacactccctggagaggcctttcctgacccagctctcaaaagtagacacacaaagctgctttctaccctatctcattctgtttccttcctagcacttaccaggagatgaacttatcttgtttatttcttatctgtgggtttatctgagcctccaatgaaagccccataagtgtttgtgacctgtacagaaggccccactggggtctgcccctggcatctttatagatcttcctttgctcactgagggattctcaatctgggatgcccttcccttcagtgacctgctaactatgaagcacttattcttttttttttttttttttttttttttttgagatgaagtttcactcttgttgcccaggttggagtgcagtggcatgatctcaactcactgcatcctctgcctcctgtgttcaagtgattctcctgccccagcctcccaagtagctgggattacaggtggccaccaccacgcccagctgattcttgtattttagtagagatggggtttcaccatgttggccaggctggtctcaaattcctgatttcaggtagtccacccgccttggcctcccaaagtcctaggattacaggcgtgagccaccacgcccggcctcctcattcgttcttcaaggtctgggtctcatgcgcttcttgtcccctgagacacccccatcccattcacttctaccaaaaaagaggctgcttcctctggctggctcccatgacattttatttacacctgccttaatgatttctttacattcttcctaaggtagtcttatttattatcttttaaactactgagaaacgccagcattctttcttccatatacatgcacatatatatacaatttgtcctgcatccttcctttttcctatttacctagatatgtccctagctactcaggaggctgagtcaggaaaatcagttgagcccaagagatcaaggctgcagtgagccatgatctgcattccagcatggacaacaaactgagactccatctctaaaattaaaaaaaaaaattaatgaaacgaaattcagctgggcacaatggctcatgcctgtaatcccaacactttgggaggctgaggtgggtggatcgcttgagcccagtagtttgagaccagcctggtcaccatggtgaaaccctatctctacaaaaaatacaaaaattagccagatgtggtggcatgcatctgttgtcccagctacccgggaggctaaggtaggaggatcgcttgagcctgggaggttgaggctgcagtgagcagagatcatgtcactgcactctagcctgtctcaaaagaaagaaagaaagaaaaaaaaaactccacatcatgacaataacttgaagcaggtaccacctgctgcaaagaaaaggaaaagataaaaacgaaagctataaagaaaacagattagtgtcatctgacctggctagctacagtggcctgctgaagactctccaagaccagctctgtttgttcacagtggagactgtcaatgctggggaggggttccagcaccgagctgtgactttcttcttgaagtaacaggattcagagcactgcagcctccaattcccggcctcaagcaatcctcccgcctcagcctcccaaagtgctgggattacaaacgtgggccacagtgcccaggcaagaacaaatttttaaaaaggaatcgctttcccattgtgcaatttaacaccatgtcagtgcaccgcctaagaccacgctggtaccaacagaggcgagagggtcaaacagcgaacacgctgggcagtgctggataagcccgtcagagcaggctctgaatagaaatggttggccatactggtgggtactggccagatgtgggtctgccagcaacatcaagtgccccatagtttgggaagtccccacgtgctagacttaactgggttgacttctcacatgccctctaaccacaggcgtggaacccgggggcaggggcggggccataaccttgtggctggtgttctgtgtttcagcacaacatgcctttctggcggatatcctgccacgcagacctggaggcactgaggcacgccctggagctggagtatttatagcaggatcagcagcatctccacctgccatctcaccctcagaccccctcgccttccccacctccccaccgagaactccagagacccagatgttggacaccaggaaggggccccacagccgagacgacgtgtccagtgaccatctcagaagccgtccatcagtccaaatgggggttctgagaaggaaagtacccaacattggcttcggagtatttgactttggggaaaagggctggctcggagtctagactcttctgtaagactcacagaacaaaagcaaggaattgctgatttggggggtgcctggtgatgaggaggggatgggtttgtcttgtcttctttttaatttatggactagtctcattactccggaattatgctcttgtacctgtgtggctgggtttcttagtcgttggtttggtttggttttttgaactggtatgtggggtggttcacagttctaatgtaagcactctattctccaagttgtgctttgtggggacaatcattctttgaacattagagaggaaggcagttcaagctgttgaaaagactattgcttatttttgtttttaaagacctacttgacgtcatgtggacagtgcacgtgccttacgctacatcttgttttctaggaagagggggatgctgggaaggaatgggtgctttgtgatggataaaaggcattaaataaaaccacgtttacattttgaagtggggtaggatgtggttactttattaccactcttgaggcttccaaatgtgttgtcctttttaaagactttatcagttgcagaagaatagaatccaactcacactggcttaagccaagaaaaatggggtggggggagggaggaaggagaagagggagaaaaggagggaggcagaaagggaggggaagaaggacaaagggacaagtgtctccaggaactttaggtggtatctgtctggatccgggtggtcaaatgaatttctctcatgtggccgtaattctcaggcaggctgttccctgtgtggcaaagacggctctacgagtccttcagcaaaaccacacagacagaaagagaccacattcttcaccgtggtgcagcgaaagcctcaggactgtaactcgttggccaaatctgaggcttaggcaactcacggagctggatttagggttggatcctgtcacgaacagcaagttgaacaagctgatcctccaagggaaagaaaatcagtgagctgttattcaaagaattgggggaattgagggtcgggctggaaaatgcaactgacttccgttctaatggtaggacttcatttcccagtggatgggacatgagtgaaggatccagtttaaggggcaaggagggaaatctggagaagttctgaagacatctggagcactgccactacccatagtggaccaggcaggacctgggtctatctgattggatgctaagcaggaatataggctccttccttattaatgctggtaaaatcgtggattatcagtcagctgacccatgtcatgggagatggagatctctgccactggagtctcagagctagaatctctgatgattagaaaactgtcaccggccaggcatggtggtgtatgcctgtaatcccaacactttaggaggccaaggcatgtgggtcgcttgagcccaggagtttgagaccaacctgggcaacatggtgaaaccccgtctttacaaaaaatacaaaaattagctaggcatatagcatgcgcctgtagtcacaactactcaggaggcagaggtgggaagagctcttgagcccaggaggttgaggctgcagtgagccaggttcacactgctgcactccagcctgggtgacagagcaagaccctgtctcaaaaaaaaaaaaaaaaaaaaggcatcactaagggtcagatagactcccttactagaccctgagcttctcagggggtaggtactgttggtttcatctctatatccacagaatcaagcacagagcctgacacaaaatagaatcccattatagatggcatagaatgaaggatggaaatatgaatggaaccacagccagatggatgataatatgggtgaatggccatttggacaaatggataaaatggagtgttaaacagttgagtacgtgggtagatgaatggttggttaggtgattagatgattaattggaaggtgggtgggtaattgggtgactggaagatggatagatgaataaatggatacctacttgggatgactagatggatagttggataaatcatgggtatatggacgaacagatagattattggatagatgaccagatcgataaccaagtagttgtgtggtgacatgaatgaatagatggtggtttggatgagtgaatggctgggtggttttacggaaatatggatagatggttaggtgggtgagttagtggataaatgagtgggttgtttggacaggtagatggatggaatgattgatggttgttggtggttgataataatattatgatggatatgtggacagtttaatgggcaggtggatggaaagttaaatggaaatgaagtgtgatggttagatggatagagagtggaatggaagtgaagaatctttagcattgcctaaaatacctgagtcagcctcactaatatctgtcagcttaggtttcttctagaatgagtggaggagctttactggataagctgacttctagctggagtggataatgagactagagtagagccacccagtcaccaaccatccactggtagtcagtgatgtgaatactcctgaatccccctgactccccattctttagcacccttgccacacaggaacccacttataatcatgatctacccatctctcccttcctgctaccatcaaaacctgctgtcagggaaaattctgtttagggtccaacaaagggtaaattacttattaagaaaattttttcttttagtaggatttcattagaaacacaagtagaatttcagccatgcacacaggaggttttgggtgaaacagatcttccccttgaccctgaaattaaactacgtaggtgatcaactacttttttgttgtgatgagtcaatgtcaaagactagttctgacaaaagttagcagtccacagtctttaaggtaagtgttttaacttgaattccttctggatgactcagagcttctgctgagtaaggatagtatttttctcatctctgtatgctcattgcccatcacagagcctggcacagatatgccacttaatgaatgttggatgggtgaatgagtagataagtggtggatggatggatggatggatggatggatggatggatggatggagagatgggtgaatagtagatggatggatggatggattagtggatggtggatggatggagggatgggtgaatgagtggatgcatggatggatgtagatggatggatggatagatggataggtgaatgagtggatggatggatgataggtggacagatgggtggttaggtggatagatggatagatggatgactgggatttcatggtcccaggcttctagacttcactgtttccccagcggtgtcttgctgctctccagaacattcttagaagtagagtaacaggactattcaagacacacatacaaaagcttttggactctcagaagtccaaccttgactccagaacttcctgagcagcccagcagaaggatagagacccacaaaagtgcccaggttgacctcaaggatgaaagaatttgcatatccaagggatttagaagtcagagagctaccatttggattttttccattgcaaatgacagaaacactatcaaaatggcttaaacaaaacagaattcatctgctcacttgactaaaagattcaagaatgagtgacctcagaccccttcaaatgcaaaactcaagacccatctttaaaattcaatttatttctctgaatccctggactctgtttcctctcctttggcttcgtttgtaggcaacatccacattcttagagtggaagctgtggaagacgtaatccaacaaagattttcatgagtaaagcattgcttaatttttaaaagataactgcctaggacagataatcaggttaaatgtattatgtgagttaatgtcctttaaatattttgagttgtttcttcctgagttacttgcagccaaaagcgctccaactgatatagcacataataaatagcattactagttttttttttttcttttttttcttttttttttttgagacagagtcttgctctgtcacccatgctggagtgcagtggtgtgatctcggctcactgcaagctctgcctcccgggttcgtgccattctcctgcctcagcctcctgagtagctgggactacaggtgcctgccaccacgcccggctaatttttttgtattttttagtagagacagggtttcaccgtgttagccaggatggtcttgatctcctgacctcgtgatccacccgcctcagcctcccaaagtgctgggattacagatgtgagccaccgtgcccagccttttttttttttttttttttttttttgagacagtcttgctctgtcacccaggctggagtgcgatggcatgatctcggctcactacaatgtccacctcccaggttcaagcgattctcctgcctcagcctcctgagtagctgggattacaggcgcatgccaccatgcccagctaattttgtatttttagtagcgacagagtttcaccatgttagccaggctggtctcgaactcccaacctcaggtgatctgcccacctcagccttccaaagtgctggaattacaggcatgagccacagcacctggccaacactttatattttttaaaatgcaactggttcttgttttttggttggtggtggtttttggtgtttggttttgttttggtttggttttgggggatttttgtgtgtgtgcgttttctggttttgattgttttttagacagggtctcactcttgttacccaggctggagtgcagtggcacagtcatagctcactgtaacctcaaactcctgggcttaagcgatctccccaccttaacttctggagtagctgggattacaggcatgagccaccacacccagctaatttggttttaaaacttataaaaaaatactcaggccagacatgatggctcacacctgtaatcccagacctttgtgggggccaaggtgggaggatggcttgaggccaggcgttccataccagactgcaacatagtgagaccccatctctacaaaaaacaaaaataaaaaaattagccaggcctggtggtacacgcctgtagtgcacgctactcaggaggctgacgcaggaggctcacttaagcccagcagttcaggctgcagtgatttatgattatgccactgcactccagcctggatgacagagtgagaccctgtctctaaaaataaaaataaaatataaaaaaatgtcagtgcagtggcttacacctataatcccaacacattgggagccggaggcagaaggatcacttgagctcgggagttcaagatcagcctgggcaacatagtgagaccctgtctccacaaataatttaaaaaattagccaggtgtgacagcatgcacttatagcccaagctaccagggaggctgaggtgggagaatcacttgagcccaggaggtcaaggctgcagtgagctgtgatcatgccactgcacaccagcctgggtgacaaagcgagaccctgtctcaaaaaaagaaaagaaaaaagttcaacctcacctataacaagagaaatgcaaatacgttcattgtccacattagttggacaaaaatctgagagtttcatgactcacggtactgatgaagctcatatattgaaaacgatgaatggattacctataagagcacctttttttaaatttttttaattttttatttttgtagaaacagggtctcactatgttgcccaggctggtctcaaacccctggcctcaagtgatcttcccgcctcagcctcccaaagtgccgggattacaggcatgtgccatcttgcctggccctataggagcatcgtaaaggtcagatgtcagttttggagacttctctgtcaataacctgtggccctcaggagcttgtttccagccttggtttcccccaaacagcatcactagccctttctctgtgtgccccacagcattgggtaaaggctgtggccatgtgggatgtagcaagaaagacccttctctgaggccccattgtccaacacaaggtggtctcagtggtctgagagccagggacccctgggaaaatcctgttaacaagtttcaaagaggctggaatatatccactcatccatgctcctacagctcacccattcacaattttcagtgtgatgaaggcactctcccacctgtcactcatatgtctgatttcatcagcctcctgtaagcagctgcattccttaatttcttttgagaccaagtctcactctgttgcccaggctggagtgcagtggcatgatctcagctcactgcaacttctgcctcccgggttcaagtgattctcatgcctcaagcctcccaagtagctgggactacaggtgtgagctaccacgctcagctaattttcatatttttagtagagatggggtttcactatgttggccagggtagtctcgaactcctgacctcaggtgatccacccgcctcagcctcccaaagtgctgggattacaggtgtgagccaccgcacccggccccttcatttcttttgtatccttttaaagtttctttatggaaatatgacaatatatttcttatttcttcttcattgttacacaaagggtggcatgtgccattggctttttttcacttagcgatgtgttttggaaatagatccgggttatgcacaggtctgttatttaccaggtgctcgtttcaacttctggatgcagaggtgaaaatgagcagatgaggtcccgaccgtcacaaagtgcagggaaccggactgaaagcggccctattgacactgggaggtagcctttgccgccagtcagctgggtcccacaagaaaaaaggttttcgccagccaggagcagggaaccagcacacaccccaggtacaggcttcattcaggcttgagccacaatctgtgtccccttccaagatctgccttgaggtcagcaggagaggaggggtcgtatgagcctccgcagggaggggaaggtggctcttggaggcctactttagccaacttcaagaagacctgttgaaaggggtcccaagaagaacttcttgacagagatggcagtatctctccagggaacattcaggggccataaaggggtcttggtgcttgcccaggaggtaaaatattgaggatctttttgctggctgagattttaacttttagggcacacagcatggtactgttagctcaaagaaggaggctgctttcttccccagtacagagtcacttcagacagtgcctggagtccggaagcaagcattgggctgatgcagtgcagactcccccgaaaagcatttgctgtggactcgctggtcacctctaaggaggtgacacttgaactcagaccagtacaacaagaaaggccagggacagcattccagggagaggtgcaggaaatacacggttccaggcaggacaaaggaaggaaaggaagccggtgtggctggaggccaaggccaaggtcagagggtgcgagcatgatagggcgcaagggcaaggcccggccagatgtcgtgggaccctattcattttggattttaaattgtattctaaatccagtgacaagatatcagaaggttttaagcagggtgcttaaaaccaatcaggttttaaacaggagggtgctgtgatatgattgatattctcaaaatcaccctggctgccatggaaagaatggctagaaggggcaggatgaagcgtctgggcaagggattccttcatacattttaaattttttttattttataattaatataaagtctattgcacaaatctcaaatctcaagtatttttacgtatgattatgctgggataattacagcacccagatcaagatggaaaacgtttccaggcaaaaggctggctccctcgcacccctgcccagtctatatccgcattccatgactgttccggttcctgtcgctaaggtagtttggccagatctagaacttcatataaatggactcagagcgtaatctttggtgcctggcttctttgactcagaatgtttttgaggtgtacccatgttgtggcacggacctgtggttcattctggcaagaggagaattcgcgttaaaaacgatggaccatttttccctaatattttgagccccatgatgcaagctcagcgcccgagaagctgtgctcatctgcaaccaccagggggcagtgcggccccacagctgacccagccgcccgcaggtgccacttgaagtgggacccggaaagagcaataacgcaagccttccgagaaaggattctcaaggcgtctgctttgggctgcgccgggctacagggattgctctgatgatactgcagcaccgtcgacgatatgttaggcccaagaggtcatggtaaggtgaccttctacagtgaccatagtggtggcctcggttgacacaatgtctatgcaggaggcagatggacgctgtggtggcctcgagagtggcccagccacctacagggctgggaaacgctgttcctgcactctgcccagctttagacatgggccgcgccagtgtttaataatgtaattgtaacaatggcttcaattgtctgggagaaatgttaggttggtaggttggttggttggttggtttgagatagggtctcactttgttgcccaggctggagtcaagtggtgcgaccgcagcttcctcgacctcccaggctcaagtgatcctcctacctcagcctcctgagtagctgggactacagccgtgcaccaccacacctggctgaattttttgtattttttgtggagattttgccatgttgaccaggctggtctcaaactcctgggctcaagcaattcacccacctcagcctcccaaagtgctgggattacaggcatgagccaccgagcccagccggatttatttttatatcctgaagttcatctgagagtgatgataatccggctctagccaaatgctgattttataattcaaccatttggccgtgtgcagtggcttacacctataattcccagcattttgggaggctgaatcgggaggatcgcttgagccccagaagtttgaggctgcagtcacaatcacatcactgccctccagcctaggtgacagagaaaggcaagaccatgtatcaaaaatctcaaaaaaaggctgaagcaggtggatcacttgaggtcatcagttcgagaccagcctggccaacatggtgaaaccccgtctctactaaaaatacaaaaaaaattagctgggcatggtggtgcatgcctgtaatcccggctactcgggaggctgaggcaagagaattgcctgaacccaagaggcggagattgcagtgagtcgagatcacgccacttcactccagcctgggcgacagagcgagactccatctcaaaaaagaaaaaaaaataaattcaaccattaagtatttggtatttgtttggggttttggttttattttgagacagagtctcgctctgtcgcccaggctggagtgcagtgacatgatctcgtctcactgtaatctccgcctcccgggttcaagcgattcttgtgcctcagcctcccgagtagctgggactacagacgcatgccaccacacctggctaatttttgtatttttagtagagatggggcttcgccatgttggccaggctggtcttgaactcctggcctcaagtgatcctcccgcctcagcctcccaaagttctgggattacaggtgtgagccacagcacccagccaagtatttggtgtttggtaaactccagctctaggtgacgggggagcctctttgcccttgcatcccctacccaactccatggggatctgggcccacagagacctacccacctctccctcagcccctgaagtctactggcccccttgtggggtaataagaaatgcatattacatattacatcaagacccagtacagcacatacatatgtgtgtgtataaataggagtgtatgtatatcatgtatgtgtgtataactcagtttcacaaagcaatgcttaccaaacaactgtgacacattctataatttttccatcctgctgtttttcagtgatgcaggttccaatctgcaaaatcaatttcacaacccatggattggaaaccactggtttagaacaaggattggcacataagctcatccaagtgattgtttttataagccccatttaacagagggtgaaactgagactcaggaggtgtcgtggcttgcctgtgattcacagctggaggcgggcagagctgagactccgatcctgcactctctgactcaggttgcaaactctggtccacagatacattttattactcttcacatgatttttttcatactttgacccgattatataaaacttgggtgatttcactcaaaatgtaaattttcaacttctctaaaattcaagtggatcccttggcctgcatttgcacatgagcagctaaagccatcccatggccacccctgtgagctgactcgggggctctccaggttgacccgttcgccacagtcctcaccatgctgtgttttttgtttttttaatttttttttcttttttttgagacagagtctcgctctgttgccaagactggagtgcggtggcacgagcttggctcactacaacctccaactcctaggttcaagcaattctcctgtttcagcctcccgagtagctgggattacagacaggcaccaccacacctggctgattttttgtatttttattagagatggagtttcaccatgttggtcaagctggtctcgaactcctaacctcaggtgatccacatgcctcagcctcccaaagtgctgggattacaggcgcgagccaccgcgcccggccaccatgctgtgttttctccctgacaccccgaagtcaagcatcggttgccattgatccacacaccagccagctgttattctcatagtggagaaatattttttctgtcaaaagtggaaaaataaaaactaaaccaaagggcttacatatttcaagaaaagcaatggtggaacacggtggctcacacctgcaatcacagtgcttcgggagactgaggtgggagaatcatttgagcccaggagtttgagaccaggccgggcaatatagtgagacccccatctctacaaaaataaataagtaactgggcgtagtggtgtgcacttgtggtcccagccactcgggaggctgaggcaggaggatggcttgagcccaggaggtcgaggttgtagtgagctatgattgtgccactttgcagtgagctatgattgtgtcactgcactccagcctgggcaacagagggagaccctgtctcaaaaaaaaaaaaaaagattaaaaaaatgcacagattattcaaacacgtgtttttgttgttattgttgttgtttggtttttggttttttgagacgaagcttcgttctttctcccaggctgtagtgaagtggcgcgatctcggctcactgcaacctccgcctcccaggttcaaacaattttcctgcctcagcctctcaagtagctggaattacaggcactcgccaccacgcccggctaatttttgtatttttagtagagactgtaatgcctaagcttgtttttactaaccttgtttttagactctccctctttcctttaatcacctagccttagttccaccttaattgactctcccttagctaagagagccagacagactccatcttggctctttcactggcagcgccttcctcaaggacttaacttgtgcaaactgactcccagcacatccaagaatgcaattcactgataagataatgtggcgagcaatatccgcagttcccaggaattcgcctgattgataacgcccaaaaaaagccccgcgtctatcaccttgtaataatcttaaagcctctgcacctagaactgtttactttcctgtaaccatttatccttttaacttttttgcctactttatttctgtaaaattgttttaactagaccccccccctttctaaaccaaagtataaaagaaaatctagccccttcttcaaggccgaaagaactttaagcgtaagccatctcttagccgccggctaaataaacagacttaattcgtctcaaaagtgtggtgttttctctaactcgctcccgtgcaacaagacgggggtttcaccatgttggccaggctggtctcgaacttctgacctcaggtgatccatccacctcggcctcctaaagtgctaggattacaggcgtgagtcaccgcgcctggcctctaacatgtttactatacaaagaaagcatatctatgtcagtgttaccccagcctgtttccctagcttatatcccctgcctgggtcctgggagcaaaccccagctgaactcactaccctatgtctacgtcttgtctcttttgtccacagttgtgtccccagcacctgaaacacagcccagtgaagagtaagtccctagttaataattaacttgtggcttttatacaaaagtttctccaatgatgacaaagatatagtcatggttaagagcaggcattttttgggcggggcgcggtggctcacgcctgtaatcccagcactttgggaggccgaggcgggtggatcacaaggtcaggagttggagaccagcctggctaacatggtgaaaccc[136 bp omitted]cactccagcctggacaacaagagcgaaactctgtctcaaaaaaaaaaaaaaaaaaaagagcaggcattatttgtgtcattagactgggttcaagtccagcttcggctacgcacaagctgtgtagcctcaatccctctggacctgatgtcctttgctgcaaaatgcaggtcattaggatgcaatgtgcagaaattgcctggagcacaggaggtgctgtgtatgtaaatgaagtttccctctcgggttcatcaaagtgaaccaaggtcagtactcagctgtcttaataaagcttgtagtacccaactggcccaggcttaggctatctgtgggaccaggaaggccacagttttccattaacaccacaatctgaaaagagtgccctgggcagattagagccctagaccaggtggcaaagccacgggtttgatccctggtcacatgtatgagaactggcttgttcaacatctgatcattcttctggggtggttttctgaactaaactaaaaaccggctgggcccagtggctcacacctgtaaccacattactttaggaggccaagatgggaggatcacttaaggccaggagttctagatcagcctggcctataaggtgaaaacctgtctttactgcaattaccaaaatcagctgagcatgatggcacacgcctataatcccagctactcaggaggctgaggcacgggaatcgcttgaacccgggaggcggaggttgcagtgagccgagatcacgccactgcactccagcctgggtaacagaatgagactcttgtctcaaaaaaaagaaaaacaacttattcctcaggctctattcagccaggcgtctgatatattcaaggttccacccatcagctgcatttggtacggattaagtggggagaaaagtgactgcacgtggcggtgtggaccagcctagggccagcgtggttgtggcctcggtgcatctgtttctttgcagcccagtcctgcacggtggcttcggtggcttcctggaagctcagacctcatggctttcttcagccctccatgtgagtccggaaatactgttttgggggtttgtttgtttttgttgttttgtttgtttttgttcttttgttttgtgtttgtttgttttttgagacggagtctagctctgtcgcccaggctggagtg[141 bp omitted]caccatgttggccaggttggtcttgaacttctgacctcaagtgatccgcctgcctcagcttcccaacgtgctgggattataggcaggagccaccgtgcctggcttgtaaatactgttaatgcatcagtgagattgagcccatgagtttgggagcagtcatgcacagatgatgggtattagatcttacataattgtgggaggagctggggaagcaggggtctgaggagagatctggagtcaccaagaaggtgatctgagaagctgtggggcaagttcagaggactcaatggggatctgtggcctctgcagtccagcggctggtgacaggccaggtgctgacatgcaggagtcaggaagatgacctggacgcagagtggaggagagcaagggcaagctggagcctgctggcgccactgcagttgtctgtcccacatctaactacagcgaccttgcaacagtagaggctgtggcttccttacagccttggaaatctcacacagctcctcttttggtcaactctaactgggaaccactcgagagccaggattctgggaaatgtggttccagcctagccaggttggcacggaactgaccagtacacttactaatgccttgtgcttaaactggttgggtgaattctgctctctacaactgaccaggctgacagagaccttggacagttctgcagtgggtactgtcatcgttttgtccacacaagaccttttgtttgaacactttcccaacttatgagtctgcaccagaagaggcttgaatctcactttcccagcctcctttgcagttagaaggttagctatgtggcctaggctcagccaatcacatacacccaggtggcacccaggctcagcaatcaaatacccctgatatggtttggctctgtgtccccacccaaatctcatctcgaattgtaagccccatgtgtcagaggaggtgcctggtgggaggtgattgaactgtgagggtggatctcccccttgccgttctcgtgatagtgagttctcacaagatctgatgcttaaaagtaaggcacttccccctttgaactccctctcctgccaccatgtaagacatgctttgcttcccctttgccttctgccatgattctaagtttcctgaggcttccccagccctgcagaagtgtgagtcagttaaacctcttttctttataaattacccagtctcaggtagttctttatagcagtgtgaaaatggactaatacaacacctaaatggtgcttaggttcagtcaatcagatgcacccacatgggacctgggctcaaccaatccagatacatccacatgtgaaagcaatggaagtggattctgatgcatggaatccaatctggcaaggaggcagaagggtcgtgcccagcgtcactagagaaagtcgcagtgtttgaacccaatggggcagtgatgtgggaagtcttttttttttttttttcagacggagtcttgctctgtcacccaggatggagtgcagtggtgcagtcaaagctcactgcagcttccacttcctgggttcaagtgattctcctacctcagcctcccgagtagctgggactacaggcgtacaccaccatgcccctgctaatttttgtatttgtaatagagacagggtttcgccatgttggccaggctggtctcaaactcctgacttcaggtgatctgcccgcctcagcttcccaaagtgctgggattacatgcgttagccaccatgcctggccaatgtgggaagtcttaacacaaaggtcctgcaatgtaatctggacattgttggttgctgtgcaatctcctaatccatctctctggccttcccagggatttgtgagccactcaatatcctttaacaaatgccttttctgctcaaattagctggagtgcattctgttatttgcaactaaaaacctgacccctcccaattcatgtatcccccaagtgtccgtttcccgagctgcacagagtggaataaccaccccagggcagctaagagaagcctggggagtcattttgtaaactcaccacggtgtcacacacacacacagggctagttgtgactggggcagtgttgcctgatgattcactgaactggcttgggaagtaagcagactggtttgagtcccggctctgcagtgaccttttgtgtgatcttgagcaagtcacttttttctctctgaacctcagctgcctcactgggagaatgggcctgttacgagggcctgctccatgtagggagttattacaaaacccgaaggattacagcatggaaagcctcagcacagagccccacgtggggcaggcccacatcagcgacacttggaggaatataggtgacctttgcttctctagactaaagaaaataaataagaatatagatggggtcctgatgtaccctgatatgaaggtggcagctaaatgctgacctttggaaaactcaactctgattatcgccactcgactgtatagtttaaaatggacggtcggccgggcgcggtgactcatgcctgtaatactaacactttgggaggccaaggcaggtggatcgttgaggtcaggagtttgagaccagccaggccaacatggtgaaaccccgtctctacaaaaaatacaaaaattagccagaaattgcttgaacccgggaggcggaagttgcagtgagccaaaatcgtgccactgcactccagcctgggcaacagagtgagactctgtctcaaaataaaataaaataataaaatagacaggcacactggctcacacttataatcccagcactttaggaggccaaggcgggtgagtcgcttgagctcacgagttcaagaccagcctgggcaacattgtgaaaccccgtctctgcaaaaaaatttaaaaattagttgggcatggtggcgtgtgcctgtagtcccagctgctcaggaggctgaggcgggaggatggggtgagcctgggaggcggaagttgctgtgagcagagacgtccctatagcactcaagcctgggcgacagagcaagaccttgtctcaaaaaataaataaataaaataattgggctcagtcccctcggaaagaaacccccttcaggttctactgaacggtgagcccctcagagagggctcccaatcacatcatctccctacccgcctagctttatttaccttcagcgcatctagcccgcctgggattatattacatgcatacaggtatcaaattgcttcccagtgagagtgtcagatcaataaggacagagaccgaacctgttttgttcactactgtgtcactactgaggacttgactcatacagagagctcagtgaacagctgtctccggaatgaagggttttggcccacgtgctcgctgtccccagtgggccagatctctccacaggctgcagttttgcctatggccaccagatagcgagcttgctggactgcatgaaaaggtctgagccagttcctgccccggtcattgccaaaggaaaccagcaaggaactggcagcttctgccaggttcaccagacctcactgcatctccctcttcttctcctcattctgaaaacactcaacccagactggaaccttcaagcccctcccctcctacctggcctctcactgacccactggtgtggcctgagaagtaagcagattagagagtgttctaattaggtggagtggattctgttatttgcaactaaaaacctgacccctccaaatgcatgtaacccctgagtctcagttttccaagctgcacaaagagtggaataaccaccccactgggcagctaagaggagcctggggagtcattttataatggtgctcactgcagggccgtttgccgtggccagagtttggggacaatctcaatgtccaccagctgggggctggccacatgcattatcccgtgtccacatagcagatatcacaccccctaaaaatggatggaggtgctcttgaactgcactgatatggatcaatactcaaggcttcagattaagtttaaaaaaaaaaaacggggcaaggggacagggcagaagagtgtgtatcaaatgctatcatttatgtagaaaaagggggccgggagcagtggctcatgcctgtaatcccagcactttaggacaccgaggcgggcagatcacctgaggtcaggagttcaagaccagcctggtcaacatggtgaaaccctgtctctactaaaaatacaaaactcagctgggcattgtggcgggtgcccttaatcccagctactcggtaggctgaagcagaaaaattgcttgaatccaggaggtggatgttgtagtgagctgagattgcgccactgcactccagcttgggcgacagagcgagactccgtcttaaaaaagaagaaaaggagcagagaaaaatgtctctgcatttgtttgtaaatgcagactctccctgaggactatgtgggaagggggattggaggggaccgaggtagcagggagggagaggctttatactatgggccctttcgtatcttcagatttgagtcatgtgggctgttttacctggtcagatgaatggtaaaactaaaagcaaccatttctctatcctcgagtaagcaagccacttccctagatgtctttgcttctaagggaggttgcggcagaggctggatgggggtgcagtgggacacctcaaggtggcctctgcatttgaatgctgcgctgctggctactcgctacttaggagcccagctgctggctgctcgctacttaggagtggcatgaccttcattgtgtccaagccctggggacacagcagggaacagagaaagcacctccctcacccagctcacattcaactgggacacacaggagaagtaataaaaccccacaccctttgctcagagatatgaagaaaatattgagggcatgatgggcccgtgggcaggtggctatttcaggagtgacatctgaagaatcaggtaccagccacagaagagggtatcaggtcaaaggagcagagagtgcagttgagactagaaaggcaggagctgaaagaagacaatggatgacccctcgtagccatggcccctcctttctctggtcttcaggatgaaatgagacaacagaggaaaggtgcacacacatgcccaggaacgggaagctaacattcttctcacttaaaaaaatgacttggaggctaggcacggtggctcacacctgtaatcccagcactttgggaggctgaggcaggcggatcacctggggttgggagttcgagaccagcctgaccaacatggagaaacctcatctctactaaaaatacaaaattagctgggtgtggtggtggatgcccgtaaccccaactactcgggaggctgaagcagaattgcttgaacccgggaggcggaggttgcagtgagccaagatcgcgccattgcactccagcctgggcaacaagagcaaaactctgtctcaaaaaaaaaaaagacttgggaggccaaggtgggtggatcacctgagacaaggagttcgagaccagcctggccaacatggcgaaaaccccatctctactaaaaatacaaaaattagctgggcatgggtggtaggcacctgtaatcccagctactcgggaggctgaggcaggagaattgcttcaacccgggaggctgagtttgcagtgagctatcacaccactgcactccagcctgggtgatggagactctccctccaaaaaaagaggagagtccaggtgccatggcttacacctgtaatcccagcactttgggagtctgagacaggcagatcacttcaagtcaggagttcaagcccagcctggggaatatgtgaaaccctcgtctctaaaaataccaaaaaatgagccaggcatggtggtgcacatctgaatccccagctacttgggaggctgaggcaccagaattgcttgaacccaggaggcggaggttgcagtgagctgagattgcgccactgcactgcagcctgggtgacggggcgagaatccgtctcaaaaaaaacaaaaaatgagaataacttgtagacagtctgtcttcctgtgaagaatgagaggcccaccctgacagggctcctgtgccctgctcaccatctgtccccagtaactgaaactgtgcatggctaatgacaggtcccctgtaatacttgagtaactgaacgattgttgtccccattaggatgcaagtttgatgaaggcagggacccgactccttgatggcaccatgggatcctcagtgcctggacagtgcctgacgcgatgtgtgtttgctgattggcaggaatgaacttatgcccacgcgggccaacctcccctgccggccatgtcatgtcttggcccttggcacaggaaggggtttgtggagatcttttctggggagttactggattgcagagaaggaacactgctgcccaggaaaccaaacctcagcctttcaagccggcttcattctactcataccctgtgcacctccagccaggcccagagccatggaccagggcacctgcgaggggctgggatccttgctgcccacgcgaggcctgttagctcggcctccctacgggcttcaagaagacaactccgtcctctcccaactgtttgacgaggactggcgtggggggcacccactagggcccattctctccagtgtgcccaccacctggctgtggggggtgttcatgacctctcacggccccttctgtgtttggtcgtgcaaacctgacacagccatcccgaccaaatggaaaactgcaaattcgaggacgaccacggcatttttccaaaacagtttaattaaaaaaaggtaaagaaatctgaaaaaactgggggggtgggggaaggaacgggcaaacccaaaaaagcatatagtgtgagtctactggctcagtcacaaagaaacaccaccatcaaaaagatatttaagtttaatacaaattttatacaaagaaaatgtgaaaaaatacttccatatgctaaaagcaattatgcttcacaaataaggccagctaggctattttttttttttgacaactgcaattcacaaatgttctttctctcctgttttcttctaatactctcttatttcttctctaatatgggtaactagctggaaactgtacagttcgcatcctcttaacaatgaagagaaagtaaacaagactaaaatgtacaacaaaacgtactggaatgatatcgtacaattaattttctcatatacatacatcaccttttgctttttcatcaatgctttttgttttacacaacatacaaaatggctctacagcatacgtagtgtacggacagcatgacgggccttgctttctctcatactgcctgtgtttcatgcttacataaaaacgtgaaattccatcatataaataatacgtacatgcttcatcccagactcaaacgtcctctgcgtgcaccttgcctttgagtccttgcttccaagaagcacagcatctctgaccaagtgtgtgtgagtgtgtttaaaggaaccacaaagcaaagataaggtttctctttttttcagagttcatgatcctaagactttctgtgttctctcctgtgactgagctgagtggggcttgtttgtttctcttctgtaaacaaggatattgttttttcccttttaggagtagagtcatcatttcaatcacatgaaagaaactagcttctccctgtgtccgtctggtccggagagcttgcgttttaggaacgtggtaacgtagtagctgaaaggagccaacggcttgatgggatagtctgtgccgaaactcccgatcccaacatgctgcgtacagacacacgagcgaaaacggttcgccctcccctgggtatccaaggatgaggacgtgagtatgaaagtggtccccgggcccagtatccattccgtcgtgtgacagacaggctaactgaccatcccttctccaataccaaaacattcttttttgttgttggggttggttgcttttttttttttttttaaatcgtttttctttttctttttttttttttaataagttaaagttaatacaaatataaaaaggggaaagtcctctagattcaatgacatccacaaattgtacattatttacaccaaaagcacagggctcgtgtgggtgaacagtctgcagtcaaagccgatgctgggtgtcctgtagtgtagcagcccccgcgccgggggctcaggctcaactgagggttttgtcattttcaagtctgaaagtggctgttctcctgcctttgttgtttcttcttttcctggcgtctgggtttttctcccaatggggtgggtggtttgtgtcccgattcactgctagtcccagaaggtgtccagccgagactctttcgggaggaggctcttcgtgctggtactggtgttgtgatcggaacgtgtcgatcccctcttctcatcactgctgctccaactggatttattactccgggaatggtctgagggggaaaaccaatgtgtttagcgtgcctgcccacctgcgcctgagcacaactatcctgcaatctgacctgcccctcctgcacaggaaaccaccttcccctcccaattgatggttcaaacactgccaccgctgactgccctgcatctgtgggtctgtagaacagaaaggtagaacaacttattttttaggatttaacgacaaccggttgaaaaaacggtagggtgtcatgctcacagagaataaagatttgtagaaaaggtgctgaactgccaaggaaggcatttcttgtgccgtgtctggaaccgtgtatccttactacatcactgaacgacaccaagcaccccatgcacttctgggtccaaccttggcccctggagaaagacactgaaatttggcatgcagtctacttccgttagtgggatttcttttatcaatgtataggcaacttgaaaaatggccttacaaccaaatcacacttgtccacccaagggaaaggatcataaaggagaagaatggttaagtccacctgggaacacacacccactgactcccggtaaggacaagcttatgggtgactgaagaattcagaatcagaataagacctaggatggcttcaaggacacatggacaaggagctgagtagtgactgagtaagaaataagtgaagaagctgaaggaagagccgaatgaggtgtctgtgaagagcactttagccaacagcccagcccagatctgcagctctgctagatggctgactggagaaaccttccagccaagccctaagatcccatcacatcctggatcatgtactaagttcagacagactgggacagaattattttttaatttcttaaggtgggtgataatgtttggttgaaagaggttgagggcaagagtggagtgggccaaggaggggaccatgctactacctaggggggctgcatttcttactgcctggtaaaaaggcatgtgtgggtaatcatgagttctggaagataagcagtgaagagaatgacaaagatctccaaagtcatgtagttactcaggagagaactcttcttagtcatgtgcatcagtgaccaaaagggagcaatactatggtaggcagagctgggggcaagggcggagtcttcttaacaatcctcaatctgccttcttatgccttcttcccttagccgccatgcctatgcttttatttctccggaaggactctggggagtgatgcagctggtcatccccatctgggagaaaatcctacagtgatgtggtcaaaccacatcaagtccttccagctctggtgagggcagagaccaccagcgggtactggaagaaatgggaccagggccaagctgagttcagtatctctctcccagaaccaggctggctaatggagggatctgcaggccctcactcctcatatggagaggacacgggacactggctgccatagccaatcaccacaggagggaatcggtgttcatctaggaccctttatgaaaagagcgaggacgatctccatcaagaagccaggccacatgctcgctctcatttcctaatgcagtttgtgatggcgaccagaggcacagcgaagaagaaacgttgcaaaggaagacccacaactcaaaagaacaggagaagacacacccacaaaggaacacatacacggacacacacagaacaagccttctgcataccaggaagaagccccggcagctttcgtaagacaggttcatacttacacttctgggcggggtagttggggtgcggctggtggtctgtggtggttggggcataggcaggttgcttgtcacaccttttgctaactgaagagatagcacaggtagcctcagagtctgtcagagagctggaattccgcacaaccccaagtgcttactatttttgttcatcaacaggctactgttattagaaccagttggcaccttcattcatgtcaccattgtccaactttaatgcaagcacaggagactaagtctctttaaaaatgcatatcaaaccacaaacagcatcactggacacagcacagcattacaggtaggaaataaggtatacaatgacataaaagcaactcagcattttgtaagccacaaattttcaaccactagctctgccaatagcctaattcaaccatgggaaacggaggcaggcactagaaacgtgctaaggttgaaggcagcacccgagaaagccagacaatttaaggcaataactcatcaactgcccacagtgataacagaatagggaggagaggatggagaaggcacacgtgatgaggaggactaaggaaggggctccagatgaggtggcaagtaagctaaattctcagctacgatggtagcacaccaacaaatcacctctgaaatcagagtcaaaaaacagtgatatgaaaggagtctccgtaaacagctgataccgtgagaagcttcataggaaaacaattgaaagtaagatcaagagaaaaaatagaaactccaggaaaaaggctataaaagaatggaatataatcacagtacactatgtgactctgccatgaatgatatggtcataatcatacaagaaagaattgtcacactgcaactttttagactaagccaacagacaagagtgaggcttaactgcagttataggacagaatgcacatgttctcaaccttgacaacggggaaagtcacaggacaggtgggaagcctggctatgacaggggtgggagaggtaaggagaagatggactgccaaaagaggggtcaagagatactgtctgtagcagacagaacaaaagagctaaggaggcaagtgtttcactggagcaaggtagcacataaaatagcaacctcagtagtgtgggaagaggaagagaagagtaactctcatcttttaaagctcgaagtcaacaaataatatctaatgatgaagtcaagaaatagaggtatagccaagtacattatttattagtaaggaggtaacagaaggaccagaatgagccgtgtaaactggaactaggaagagttttcccctgcactattttattctctgcaactctatgcatatagctctaactaaaagcttaaaacgaaaagatgaacaggagaggcccacacactaagggagctcatacccctaactaaaattctctctcttccaactaaacttagatgtactgtcctagtacctgatgcacataaatagctcagaagccttgacgtttttaaaacccatgttccttctagatatgtcacgtgcgctgtcaccagaaagcaagtgctggcagaagtaaagtgacatggatgaggaattaattagaaggggatcaaaactgaggaagtctttttgctttgacgtgacctgtcaacacaaactgctttggtgagaaaatcgggaagactgagaagactgacggctgcattcccgcacagacctctgcggcctccctgcagcttctcactcacactctcagaatcactgcggcactgactgcaaaacgcactttttctgccactttctgaccatgggctccatggcgctctcactgtgctgatgtgactctgcccagcctctttccaagtcctaaatgtcggactaaatctcttgtttttgagacacagtctcactctgtcgcccagactggaatgcagtggcacggtctcaactcactgtaacctccgcctcctgggttcaagtaattctcatgcctcaggcccctgagtagctgggattacaggggtgtgtcaccacgcctagctaattttttgtacttttagtagagacggggtttcaccatgttggtcaggctggtcttgaactcctgacctcaaatgatccacccaccttggcctctcaaggtgttgggattataggcatgagccaccacgcctgacctaaatgcggggctaaatctcttttagtgtagccccgggtgcacctcaatctttatccaaaccctggagaggaggccctttctgacatgaagataccatgattctagccaatctggtcgtcttttaagaaaaaagtctctgctgctgaccacggtggcacatgcctatgatcccagctactcaagaggctgaagtgggagaatggcttgagctcaggccaagttcaaggccagcctcggcaacaaggcaagatcctgtctcttaggtttcaaaacaacatttagaattaaaaatgtcggccaggcatggtggctcacgcctgtaatccaagcagtctgggaggccgaggcaggtggattgcctgagctcaggagttcgagaccaacctgggcaacacggtgaaaccccatctctaataaaatacaaaaaattagctgggcgtggtggtgtattcctgtaatctcagctgctcaggaggctgaggcaggagaatcacttgaacctgggaagcagaggttgcagtgagccaagattgcaccactgcactccagcctgggcaacagtgcaagactccatctcaaatactaataataataataataaatgtccatgactgttaatggcttagggggatggtggagtatcagaatagaaactgtatcatagcagcagcggagtgtgtaaagaaagggaaatggagacaaatgaaacaacttttttttttttttttaaatatgaggtctcactctgttgcccagctggagtgcagtggctattcacaggcactcactgcagtctcaaaactcctaggctcaagtaacccccctgactcagcctctccaagtagctgggactacaggtgggccctagctctagaataacaacccttgaagagacatctaactaactgggttgaggaaggagacaggacaggtcttaagctatgccattcaatatggtaaccactacaataagatacaatgttaaattccattcctcagtcgcactagccacagttcaaggcttcagcagcgacacgtggctagtggctaccatagtggacagtgcaaatataagaacatggccattgtcacagaacgttctattggagatgcaaggtgtcaaggaaggcacttggagatagatgaggatatttaagtgcctaggaagaaaagcaatacagagtgagaaatctggctacaacaaaggatgcagatgcctttgaacggcaggagggaaggacagagcacaccacggaggccctgcagagggcagaggagcagccctgagcgcccagggatggtgacgcagggagagatgcagggaggtccaaaacagagcagagaacttgagaaatagccatcatggacgatggaatcctgataaaaacaaaaaacttgggtcacaacacaggcctctggccaggcacggtggctcatgcctgtaatccagcactttgggaagccaaggtgggtgaatcacttgaggtcaggagttcaagaccagcctggccaacacagtgaaaccttgtctctattaaaaatacaaaaaattagttgggcatggtgatgcacacctgtaatcccagctactcaggaggctgaggcaggagaatcacctgaattgaggaggcaaaggttgtagtgagccaagatcacgcaactgcactccagtctggacaacagagcgaagactctgtctcaaaaaaaaaaaaaaaaaaaaaaagggccgggctgggcgtagtggctcaagcttgtaatcccagcactttgggaggccaaggcacgtgaaatcacctgaggtcaggggttcaagaccagcctggccaacatggtgaaaccccatctctactaaaaatacaaaattagctgggtgtggtggtgcacacctataatcccagctactcgggaggctgaggcaggagaatcacttgaacccaggaggcagaggttgcagtgagccgagatcatgccactgcactccagcctgggcgacagagcaaagactctgtctcaaaaaagtagaataaaaaaagaacacaggtctctggggacaaaaagtattaataaaagaaaaacatattgggaagacgatccggcagaagagaatatctgcttctgaggttagtgacccagatttgcgtgtgtgatgagaggagtttgtgttcttgtgtaacattctccagttaagcactgaggctcaggtgcaggtaaatcaaaagcggaaagctggggttcatccaaggtgaggttttgccaaatggacatgctaggaaaacaggaagggcctgggagactgggttgtattagcaacagtactccatggaaattaagctgggtaaggaggtaggaaggagggaggtatagaaacaagacagttagtagaattgggtgaggaaaaaaaggccacatctgcacgctgacgtttcctagagatcagtgccttattagcagagccacgcacaagtgccattactcagccatttttgagttacaacaattttataggtgtccacctaagtatacctgacatatggttgcaagcatgagtctggattgcaaagctcaattggttgcatatggttgcaaagctcagtccttgttaaaaagagaatcaagaaatatgagagatgctaaagacatctcagtatcaaactaagcctgttcgaaggggaagtgaagagggagttgctttctcagtaggtgcttccgtcatatttaatgccaagttcgtatccttcctaaagtgagctcacgttactccctctgactgtgcccccaaatcccacccacccacctttcaaagcatgagtctggagagatctgaactgaagtcttggctctcataattactcattgagttacctgggcatctgagttaatgtctctggacctcaacttgctcatctgtataatggaaatactaactatgctcttacagacattggggaaaaacatgataaggtgttcatgctcttcagtatcaccaatagctgctcttctgacttcctttgaaactccacgaagataggcatttatctgccttattcagaaaaactgccccttcctccccctgctcgcccccctcttccccccaccatttactggggcttcttgcctcctctcccttccactccctgggccagtgtgcctcaggtcaggagtcagcaaactatggccagctcaatgcctgtttttgcaattcaagtttcattggcacaaggcacacgtttgtttacatattatctatgtctactttcacactacaacggcagggtgagcagctatgacaggaaccatgcggcctgcaaaacctaaaatacttactaaatggccctctatggaaaaagtttcttgaccctggtctaggtaatactcctccagctcagaatggaatacgatgcctctcccaactaccttcctgtatgccaccctcctgatgccaacagactcctgccagattcatcctaccacggcatcattcatcttctcagatgccatttcaatcaagccactttgaggctccaaaaccctaacagcacccctctgtctgaaacggtgtttccctaacttggaccttcctcacaccacttgtgccatttcgacacatccatagtcctcttacatattgcttagttcatgtttttattttaaacttatgtaacttaggtaaataactaaacttttattgttaaccaacaaaaaacacaaaaccaataaaatctgctgttaaatcaagggcaactccaaaaatgaatgtaatgaaaaccttaaattaaaagttctagggtggggagcatgcggctaaaatctagagtctgctcagtctttgttaaaaagagaatcaggaaatatgagagatgctaaagacatcttagcactaaactgagcctgttacaaggggaagtgaagagggagttgctttttcaataggtggttcagtcatatttaatgccaagttcatatcctccctcctaaagcaagctcatattactccctctgactgtgcccccaaatcccatccaactttcaaggcctagccccttagggaaaccgttcccagcccctaacaatggacatcacttcttcctccatgcactcaatatgcagaagtgaaatgaaatgtttgcttttcagctcaagagaatcgtcagtggctcacgcctgtaatcccagcacttccggaggcagaggcgggaggatcacttgaggtcaagagatcaagaccaacctggccaacatggcaaaaccccgtttctacaattttttttttttttttttttgagagagagtctcgctctgtcttccaggctggagcg[140 bp omitted]ttcaccatgttggtcaggctggtctcaaactcctgaccttgtgatccgcccacctcagcctcccaaagtgctgggattacaggcatgagccactgcgcccggcct[133 bp omitted]cactccagcctgggcgacagggcaagactgtctcaaaaaaaaaaaaaaatcatcatcaggcagaaaggtcctggagctgtggtgccaggcaaaaaccttgaatgaagtaaaactgtcttccaccaggaagacaccttctctgaacccttctggaatgacccaaaactgctttaagaaagtgcaggaaaaagattctttgggctaaggaaggaagacagctcaaaccccacagaagaaaaaacctagatgtcaagtctcagaaatttccccaaacctgcctgccaggttattctccaaaaggaaaggatttaacagaaagatcatccacttaagcactgccttcaattctcaaaggcttgagcgccttcatccaccatatgcaggtgtcagaacctcagaataaaatcttacacagtgtcatttaccgttctcatttccctgagagagagagaaaaaaaaaacttcccaatccaaatgcacttcttctaccctaccccaggtcagcaacagaaccctctgtccaaatggagttttatgtggatccccagtaaatacaataggtaataccgatcagcttgaagaggtacctgaaagttaacatgctcagctaccccctcacccccactgacccaccccaggcacccctaaggatccataatcgtttggaaaccattggaataaacccttcaaattctccctgacaaaatggctccccatctgcccatctgaaatgtgaaagcaccgttcgcccaccagggggcaacataccagagccttggttggagcctaagagaatggaggagggcgtctctctggagccagaaaggtcaagggtctagaaatacaaaaagaaaaagatggactcaaggcactgaggctactgtcgcccccacagggaaatccagggagtcatgggggtgctcatcgctgcccccaaagcatctcagtgtcctctgcctggcacggtcaggtgggagtgatgggcacagggcggccaggtggccaaaccccaggtaccatctcccacactgaacagactggaacgcagcaccagagtggcccctcactgtaccctagaacattcactgtttcctaaactccactcactaacagaaccccctccagatttttgccatatccaaggagaaagtacattacttcaaaattctgtcagtccgcttttaattcatgctagcctctgactaggtaatactatcagttaaaccaacatgttttaactgacagtctaacgatttatctttttcctaatatgcaatgaaatagatatacagtgactaaaaatgtaaaaaactatatactcatgaaaatagtctttgcataccatcaatgtcacatacatcacaccctggcaaacaaacaaggaggtgaaaccttcgtggcccaatagggcagccactagccacatgtggctactgaaatctcaattaattaaaattaaataaaactgtaaaatcaggtcctcggtcacactagctgcatttcaagtgctcaaaagctgcatgtagctagcagctaccattctggacgggaagtacagaacatttccatcatcgcagaaagttctcctgggcaacactattctacactttgagggtccccagcagagagtactggggagcagctgccaggtcccacacacgccggcccaggctccatgttcccacacatccactggaaatgccggcacactgttaggacaagcctcccacaacacggaactttcagggcggcagacagggggtcctaagtccacttggcacaaagggtagatgtcactagccaaaggcatggggggatcctcaccgagccactctccttgcttttctcagctgacgtctccttctctttggaggcgctggccgtttctgaaggtgctgattgtgtgctcgaggagctcccctgggaggacttatttagtgtttctgtgttcacctcagcatccgcttcctgctgaggagcagtagctggggacaaaggagagagagagacgccacatatacacagagtacgatgattttgaaacatgcatggagccccgccctgcacccagtggcacccaaggctcagccctacccagggcataaaagtggaggctcaagggggccagattgccagagttttccagaagctggaattccaaactttagaattccaaattttaacataaacatgctgagatggagtctcgctctgtcagccaggctggagtgcaatggcacgatctcagctcactgcaacctctgtctcctgggttcaagtgattctcttgtctcagcccaccaagtagctgggactcaggtgcacaccaccatgtccgactaattttttgtatttttagtagagacagggtttcaccatgttggtcaagctggtattgaactcctgaccttaggtgatccacccacctcggcctcccaaagtgctaggattacaggcttgagccaccgtgcctagccaacatgttgatttttaatggttagcaattcaagttttattaaatcattctggagatgaaagtatattcctggaacaaataaagcccatcaacaagagccaacctgtaactgctgatttagttactctatttagtcatttctaggtggagacctatatttttagccccagagactttcttccttctaaggtgggacaggaaaaccacgtgaaaggcgacatgctatcagaggcccagagaatctggagatggcagaaacttggacacatagaaaaacagggcgtttggggccgggtgcggcggctcatgcctgtaatcccagcactttgggaggctgaggcgggcagatcacgaggtcaggagatcaagaccatactggctaacacagtaaaaccctgtctctactaaaaaacacaaaaaattagccaggcgtggtggcgggcacctgtagtcccagctactagggaggctgaggaaggagaatggcatgagcccgggaggcggagcttgcagtgagctgagatcgcgccgttgcactccagcctgggagaaagagcgagactccgtctcaacgaaaaaaaaaaggaaaagaaaaacgcgtctgggaggaatttaggaagaacagatgtaattatgtcacaaaaaaaggaaagccgaaggacattttggccatcttggcaaaacagcaaaaggctcatcagacacattccagaacggagggaaaacacaaagagactttactccagtaagagaccaaaagtctctacaaagaagacatctccctaaagactaaagaacagggcaaggtattctccaatattgccttttaaaaaataataaaataacagatttgtctagagcaagagctggcaagctagtgctgcctgttttattggcagacagccacatccatccatttatatatcatctatgtccatccatttacatatcatctaagactgcttctgcactgcaacagcagagttaagtagtagcaacagaaaccacatggtgtacaaagcctaaaatattcactctcgcccttcacagaaaaagtttaccaacccctggtcaagcttctcacacttgagtcatttacataccacctttgcaaattttgccaatccgcagacatactactttattgtattatttatgggacacttgaaattctttaaaatggaagtgtttaattccaaccatacaaagctagtatcatttgccacaaataaaagctaatggtaaaaaataacttataggctgggcgtggtggctcacacctgtaatcccagtactttgggaggctgaggccggcagatcacttgaggtcaggagttcaagaccagcctggccaacatggtgaaaccctgtctctactaataatacaaaaattagctgcgcatggtgatgtgtgcctgtaataccagccacttgggaggctgaggcaggagaatcagtggaagccaggaggcagggttgcagtgagccgagatcgtgtcactgcactccagcctgggggacaagagcaaaactctgtctcaaaataataataataataattcataaaatattattgatgccaggcgctgtggctcacgcctgtaatcccagcactttgggaggccaaggtaggtggatcacctgaggtcaggagttaaagaccagcctgaccaacatggagaaaccccatctctactaaaaatactaaaaattagccgggcatagtggcatatttctgtaatcccagctactcgggaggctgaggcaggagaatcgcttgaacccggaaggcagaggttgcactaagccgagatcacgccactgcactccagcctgggcaacaagagcgaaactctgtctcaaaaaaaaaaaaaaaaggataaattctaactagatagtgcttcctgctggaagctctaggcctggggactgcttgttctatgttggaaagggtgattacaaatattacagcagtgtcaaagataggttagtaccaaactaacactttttacttaacaaagaaattgggaatccatattatctaaagccacaagtccattactgccaaaaaaaacacagtgtctcaacttcagtactactgacactttaggcctgagaagagatcaagggttctgcaaagatcaaaggttcaaaatgcccatggctcaagttttagctatgtgcctgcacactgctcacctgtgtgtaagacacaattgtttttgagtgaaagtgtccagaagccaggcaagctcccttgacaattagccctgagacccctgaagtccacaggggagaccaatgccaagccactgcagcccaggacgggaggcagccccacagggcattacctgactgggtgcaggacttcatgtgctcaggccagtgggcttgctggcaggggtagtcacagtagctggtgttccaacagcagtaaaagatggcctccttcttgcagttggcgcaccactgcttcttcttggtctcatccaccgcctgctgcttctccaactccagctgcttcttcacctcggcgatgagccggtcccgctcctgctccaggctctgccgcatctccgccatggtcagctctggtggaggaggggaagaacaccgctcatcacctgaccccagcctggggtgtggggttattcctgcccccagattcaggcagacgtggatgcaagacctggctgggagaagccctggctgtgtgcccatgggcaataacctagcccgagtcttcatctgtaaatagggcattcatcatggtgaccagatggtgctgcctgttgagagtggacatgaggtgcccagcatggacataactgcagccccagaggattttccacaccagactacattctgggaattcctcaaagtaacccttgaaacaactgccaccaaaactcactttctatcctattattcattaacataagccttttcccccctatcaatcaaatacctatacagcacccactacatgaaggcactgttctaagaactttataaatattaactcatataaccctcatcctaataatcctacggggtaagtactactattctacccctttcgcagatgaggaaaccgaggcaaacagctagctgggcctagacctcaggcgtgctttcttgtaggtgtctcctgtggcactggatccagatgggactgtggttgatgattatactaacaggacaactatgaacctactcagtctaccaagatttctctaattttacttcagacagttaagtccactggtaattcatttaggagtgacctgctggctgtaataaaagaaaaataggccaagtgcagtggctcatgcctgtaatcccagcactttgggaggctgaggcagatggatcacctgaggtcaggagtttgagaccagcctggccaacatggtgaaaccctgtctctgctaaaaatacaaaaattagctaggcgcgatggtgtaatcccagctacttgggaggccgaggcaggagaattgcttgaacccaggaggcagaagtttcagtgaaccgagatcatgccattgcactccagcctggacaacaagagtgaaactccattgacaagggaggggaagggaggggaagggaggggaaggaaggggaaggaggggatgggaggggaatggtccctcaattccttcaaatactcttcctgaactttataaagtaaaattaacccctcataaagaagttaactacctgtggccagacagaacctttgagtcaatctaactacctttaactaggggtctgtaaaccatagctaagttttggccagcccacaggtaattttttcaaatgtgcagtcaacacataaaaagaaaaggattttatgaaagtaagattccctgattttattagaaaaacaagaagtggtggcaggggcagtggatcacatctgtaatcccagcactttgggaggctaaggtgggtggatcgcttgaggccaggagtttgagactagcctggccaacatgctgaaaccccgtctctactaaaagtacaaaacttagccaggcatggtggtgcatgcctgtaatcccagctactcgggaggctgaggcatgaaaatcacttgaacctgggaggcagaggctgcagtcagctgagattacatcactgtactccaacatgggaaacaagagtgagactctgtcttaaaaaaaaaaaaaaaaaggaaaacgagaagcaacaacacccaaatcagcgtccagaaagaatgaaccaagggctcctctccagggggctctgaaaggattcatgtctgcaaggtgtgacttagatgctgaccacaagtgagcaggtaggcacacctgggcatgggtcctcaacctaagagttctcctggctgccagcagcccatctgatctgatactacgtgaggggctgaagcaatcacttctacctttggggaaaagcttaactatacagaacgacaggccaaaacatctgtcaatctaatccagggaccaataaagtatctttctccgcactgagcagtgcacaggaagcatccagatattgttaaagtgcctagcattccatgatgaacagggtgaagagtgcccagacttgaactgtggccgtgtgactttgaataatttcctcaacacgtcggtttcttcccttgaaaactggggatatgtccacgcatgcggagtgtgaaaaaaaggaaaggaaaaccagggatataacagatccctttatcacaacagtttgtgtaatgaaattagttaagtgcactgcagccttaacttctcaggctcaagtgatcctccttcctcagcctcccgagaagctgggaccacaggagcgcaccaccaggcccaggtaatggtttaaaattttgtgtagagatagggtttcgccagattacccaggctggtcttgaactcctggaatcaggtgatcctcccatctgggcctcccaaagcgctggaattacaggtgtgagctgccgtgcctgaccaatcctcattattttattgttgaggctggtgttctgaacagaggaaaggggggctcccgccaacacccactcttacacctggtttctccaggcccagactctcaggattctgtggtctccctacgagtcatacaatcctagcctagctttaattgcactcacatctcggcttgactccagaggtgcaaagaagttcacacccaaaaccctcctcagtccagaccagtgtgtcaggccttacctaagttgtgtttcatttcggagagctcttgctggtgcagccactggagcttctctatctcgatcctcagcctgcgaatctggaagagggagagtgagcgtcttcaaaagctgtctcatgcagttcaccaggagggctcagaagctcaaccacggctggctgtgaggggtatgggaatcatgctaaccttcccacagctatagtccagagaggtgatcactggtgggtgaacccaaattcaccagaaacactggttcagaaaaccaagtataaacaggccatcaattccaagaaatactggcacgagggaaagccacttaaagtgacaaggaccagactttcatataaataatatattaagggttatttaggattttggtctataaatacgtaacaaatacaaagatagctggattttcactcttacataacatttaggtggtgggatccacacttattcacctgaaattccaaagcctgacatctctgaaaaccaaagggtatttctgggcagaggaagtgtaactttggatccaaactcatttgaaagggcaaataaacaaacaaactcgacctgatctgataggaaactaattaaacagtgttttggccaggtgcggtggctcgcgcctgtaatgctagcactttgggaggccaaggtgggtagatcacctgaggtcaggagtttaaggcaagcctagccaacatggagaaaccctatctctactaaaaatacaaaaattaaccgggcatggcggcgcacgcctgtaatcccagctacttgggatgctgaggcatgagaatcatttgaacccgggaggcggaggttgcagtgagccaagatcatgccactgcgctgcaacctgggtgacagagcgagactcttctcaaaaaaaaaaaaaaaaatttaatttaaaaaataataataaacagtgtttaattatcgcagtagttcttaactggggcaatttcgagtactctcccctgtcatgagaatgtctggagtcatttgcggttgtcacaattgagcagtgttgctgacagggatgctgctcaacatcctagaatgcacagggcagccccacaacagaaattatctggttcaaacgtcagtatagctaaggccgagaaaacctgattaattcacgtagtgtgaacaatcacatttcattgcagaaatggtgtctctaattgtgggggactgcatattataacctctctaaaatccaaaaaaaattctggcatacatccagaccccaggtttcaggtgagatattatgaacctgtattttcaaccacacaccaattcttacaacgtatacaaacaagaatgaagctgtttctaaagccttattctttcccttcttatttgatgtccaaagcataatcataaaggtcatacttgcaaaactattcaaggggattcattgatttttcttgggtctcttaaatctttgtattcacattgtcttctgttgaagggaccaccaggttgccttcctgaagatcttctcctcttcgtctgagcaccagcctaatgctgccaagtcctaaaaggtcaatagctctgcaaaggattcccacagctccccaacgtcaccttaaatgacctctgtaagtcctgccatttgtcatttcacctgataacccgtttgcatctggcctacattgtaccatccacagacagccggcaagtggcccactctccaagccctgatagggaattagcctaaaggggaagttcagggaggtgtatttttaaaagcggatgctttataagtagatagcttaatttttttttttttccttaagagacagggtctcattctgtctcccaggctagagtacagtggcacaatcacaacttactgcagcctcaaactcctgggctcaggcaatcctcctgccttagcttcctacaggaacacaccaccatctcctgcttgtttttttaaaatttttgtagaaatggggtttcactatgttgtgcaggctggtctcaaactcctggcctcaagcaatcctcaggattcccaaagcgctgggattaccacaacttcccaaagcgctgcgattacagccaacatgcacagccaatgaaatgtcttaaccactttcttgtctacacaatcacataattatggagactccagtacacaaattattgaacaagaagaagcacttgtattaaaaagtccaaacttccagagaagattcaggagccagttttacatgaagcaaaaagaactggtgtccagtttcaccagtaggttaactgaagctctgattttggctgttttattagaaatgaattgatcacacaaagcagggcatgtctccacagccccagccgtctggctaaaggaaaaaatacccccatcgataatgacaatcagtagagccagcttagtgaccaagccaggaccccagaggggtttccagagaagcttcttcatggtaccacctttaaagcagcccacaaaacactcttagcaaataagaaattcatgtgtcatctctgacctcagctattgtgcttccagtagtgtttttagaaagatcgttgtatatttctgtcattgttccttttattgcatccatcatctgaaagataaaaacagaaacaattcagctgatcacttcttggaggcttttcctggtgacaaatacttaaaatctatctgtataaagcagaggttctcaacttagggcaattttgtcccgcatgagacactgggcatttctggttgccatgacaggtgcaggagcaaggagaaggagctgctactggcatctagagggtcgaggcagggacactgctaaacttcctacctgaaccatgctaaaggcacggaaggaccccacacaaaaaacaatgacctacgagcccaaaatgtcactagcactgaggttaagaaaccccagcattaatggggtaaaaatttccaacaaatttcatggatcgcattgtggtgccacttcataaccataaagctagtttccatacccacataaagctagtttccatactacagtttggctgaaaccggagaggccaaatttggcccccagatgtgtggtgttttttttgttgtttttttttttttaagatggagcctcactctgttgcccagactggagtgcaggggcgtgatcttggctcactgctacctccgcctccaggttcaggcgattctcctgcctcagcctcccaagtagttgggattacaagcgcacaccaccacacccagctaattttttttctatttttagtagagacggggtttcaccatgttggtcaggctggtcttgaactcccgacctcaagtaatccacccacctcggcctcccaaagtgctgaagccactgtgcctgacccccagatgtcttttatttgcccagcacagtaggttcgagagaaggattactttgttttggttttcattatttcccgtcaaaaaaccagcaccgctttattgaggtatatgcatatactataccattcattcatttaaagtatacaattcaatggcttttagtacctcagagttgtgtatctgtcaccacaatcatttcacaacattttcattaccccaaaaagaaaatcccactcccccggccttagtcttcacctcctggtatcccatcccccgctcccccagcgcctgacaaccactgatctgccttctgtctctccacatttgctcagtctggacatgtcatataaatggaatcacacaactcaaggtcctctgtgactcgcgcatccgtgctgcagcaggcagcggaacttcattcctttttatagtccattttacagatatggctggtttgtcattttaatgccttcagtcaggacactgtctttgcggttcatttcccatctttaactatctgacccctgaaggcatcagccagttggtgacatcagctaaggtccctgcagcaggcacccagggatttgctgactatgttaataggatgaatttctcttctacctcccacctgccagctgactcttcccccattacagcagaaagaggaggggacaagagatcaggctctgtctcaggcctggcttgactggtgctgagtctctccagtgctttctagatgccccaattcagggagaaggcgggacaaagagcagcctcctatctgatgcctcactatgcactgcctctaagcctcggtttccccacaaaaaaacaagaactgcatgccgccccggtagggtgtgcacgaggattaaatgaaaaaaaccacgcaaacactgcagctcgttacctgccacggagtaggtgttcataaagaaatacccattcatcttatttttaaagaaaaagaaattcatgtaagtatgcaattgcgtaattgctgccaaaccccaaaatagtaggcccaaattcaccccaaaatggagtaaaatgaataaaatctctgttgagatttccgctcccggcttgctgcggagcccacaccaggccgttgccagcaaaaacactctgcgctttccacggctttgcagccctcctgcacttgcctccttgctctgttgcacccactgtgtccattttaaaaattacaactaaatggctttacaagaaaactttaaaaagtgggtgaaattcaatacattgctaatgtaatggtcacattccacttcaaagatatcatgcattcatggactgccttttactcttaacttccaaatatagcaaagacttcaacatcggtaaagaacaccactttgccaaaacacacagaactgcgtcttccactccaggtcaactcagagacaggaaaagttcatcagctcccaaaaaatgtcactgtgttcattttttttaacttcaaagaaaacacttatcaaaaaagtcattcctggacaggcacagtggctcacgcctataatcccagcacttttgggaggcagaggcaggcgaatcacctgaggtcaggagttcgagaccagcctggccaatgtggtgaaaccccgtctctaccaaaaatacaaaaattagccaggtgtggtggtcagggcacctgtaatcccacctacttgggaaggtgaggcgagagaatcgcttgaatctgggaggaagagtttgcagggagctgagattacactgctgcactccagctaagagtgagaccttgtctcaaaaataaataaataaataaataaataaataaagttttgccaaaagtgtcaaggggagctggggtcctgaagacccagctacctggggaagccaaggtgggagggtcgcttgaacccaggagtggccagcctgggcaccagggttagaccccaactctaaaaaaaaaaaatttcttttagtaattttttaaagaacaaaggggatgcagaaggtaacaaaattaaaatggctgcaggagctgagaaaacagccttcctgcaaaccactaatcagacccactcagtaggcctcagctttcccattcataagcaaacagctgggactaaatcaagggaaggtgatgtaaggacaaccgaaggtagaacaagagatcattcaggcaaaaccagacacctacttatatcactaacgaaaaaattacccgctttcaattctctaataatcctacagattgcttcagcaagaagtctcagtttggtgctgttatgcctttaacactttcatgacaacctcccccatgtttttttttgttttttttgtttttttttttttttgagacagaggagtttcgctctgtcccccaggctggagtgaagtggcgcaatctcagctcactgcaacgtccatcccctgggttcaagcaattctcctgcttcagcctcctgagtagctgggattataggtgcctgctaccacaccgggccaatttttgtatttttagtagagacggggttctgccatgttggccaggctagtctcgaactcctgacctcaggcaatccacccgcctgggcctcccgaagtgctaggattccaggtgtgagacaccgcaccaggctttttttttttttttttttttgagacagggtcctgctctgtccacccaggctggagtgcaatggtgcaatcacagctcactgcagcttcaaacttctgggctcaagtaatcctcccatctcagcctcccgaatagctgagactaccggcatgtgccaccaggcccagctaatttttttttatttgtaaagacaagatctcagtgtgttgctcaggctggtcttaaactcctggcctcaagggatcctcccacttgagcctcccaaagtgctgcggttacagccactggctcaaacagccacactgaatcctaagaggagttgcttataaaagtcatgtggcaacagtttgtggaccatgaacatttgtggtcagcaggcttgtttgaaatgcacaaagcagttcaaagccaggttaagtgcacactctctagggcctggctgctatcattcaaagtccagctttgccattcactagcttgtgaccctagacacactgtgtaacctcaccgggcttcagttttctcatctataaaattggggtgataacagtacctacacttcatcaatttgtcaagaagactgagtaagtaacatacaaaaagtgcttaggacagcatctagcctagagtaaatgctatgcagacatattgctaccttatgtggtaggcaaactctaagtgggctcccgatgatcccaacctactaatattttgtgcccatctgtaatcccctccctctgacctagcaacttgcttctacccaatggaatacagcaaacgtaatgaggtgtcacttctgtgactggcctaagtaagcctgtcacttccatcttgccagcaggctctctccattgctggcttttgagacagtttcgctttgtagcccaggctggagtgcagtggcaagatctcggctcactgcaacctccacctcccaggttcaagcaagtctcgtgtaccagcctcctaagtagctgggactacaggcgcatgccatcatgccaggctgattttttgtattttggtagagatggggtttcacgatgttgcccaggctggtcctgaactcctgagctcatgcaatccacccacctcagcctcccaaagtgctgggattacaggtgtgagccaccatgcccagcctccattgctgattttgatgaagcaagctgccatgctggggaggcccacatggcagggaactgagggtggcccaggccacttgccctcaagaagtgaatcttgcctgccaccacctaaatgaccttgagagtggatcctttcccagttgagcctttgtgtgagtcccaaacccttgcagacaccatgactgcaactgcaagagatcctgaagcggagagccccgtggagccatgcccagattcctgacccacacacactgtaggataataaaggtgtgtgctgtttaaagctgctaagttttgtggtaatttgttctgcagcaatagataacaattacacctacacagaagaaataaaaagaaacatgaccaatgaaaactcatttgtgtaaaaaaaaaaattcatatatatttctctcaccactcagaattttaaaagattcctcttcccttaactcaatataataaagctaactctttattattaagactataagaattttagaaacaggctgggtgtggtggctcacacctgtaatcccaacactttgggaggactaggcaggaagatcacttgaggccaggagtttgagaccagcctgggcaacaaaatgagaccctgtttgcattttttaaaaagaaagaattctagaaacaaccatcctcaattattttcatccattctaaaaactagaactgtttactcatcagtattagtaatctactcatcagtaaagaataaattattaactacttagtaatttactaactaatctcagtagattataaatcaatagctattattaagttattgataataattgaagccaataaaaacaaagcccaactatgggtcaagcacttactacatgccaggcattgttctaggccttggcagtgagcaaaacagacaaaaattcctgcctttgtggacctgacattctggtggttattattaccaccgtggtctaatgacaagatacacagcacatcagtccagcgcactctcacatgacgctgagaactgcagatggtatctacctgaattcaacagtgaccataaaagcacttggcaggccgggcctggtggctcacacctgtaatcccagcactttgagaggccgaggtgggtggatcacccgaggtcaggagtttgagaccagcctggtcgacatggcgaaaccccatct[134 bp omitted]actccagcctggggaacagagtgagactccatctcaaaaaaaaaaaaaagcacttggcaacttaagagaaaaaaagaaggggcctgtgctgagacagttcccatgagttcaccaacaacaggcaatcctgcccaccatgccacttaatggggactgtgccccagagggcaggagacaggggagagggagtccccttggtccccctccccatccatcttgattcctggaaaaatcaaagtgtgggcatctcaccttgccagtctcatgtttaagtctctgtcacttctgctccacatgcaaagctctaaatgcaaaccaaacccctggtcagctgttcactgaaggatcagtcatgtgttccagtgccttaatgagtgacttgaattctcgaaggtaattctgattatgtcatttgcactttatgaactgactttagaatctaagcccacttggagtaagattcagtccattctacatttctctgttagacccaaattaaagaacgtggtcttggagattctgtttttaaaaaaaagggtcttcactccctaaagactgcaaggttaagacgctcacgcttcccctcgggagaccaagattctggcatcctgccaggtgtctgccatctccacggtagctctcccatccactcactttgctagtgtacttggcaatatcagcggcgacatcagctgaggcagtggcgatgggcaggtcagcgttgactgaggacacaagggtgctcatggaccccgagctggtgaccaggggcgatgactgtgtgctggtcaccagggtgatggtggacgtggatgggctctgtgtgatctccttctgctggacagctaggaaggcaaagcatcctgattaccccacgtgggaaggacccatcccagcacaaagctgtggtgtagaagcaaagcccctaatagacatcctgagagcttttctacttttaaatgacaaagatgctccccttgaccaaactctatccaggtttctcaactaggccctaaccttggcctggaaagacttgagcaaacattgacagtttctaagagctcaagagtgcatgctaggatgaccccaaccccctcttaaagcgactgcctgggaaaactcaatgctggcaaaagaactgacagttttgttccagccaacacctgaagacaggacctcagcatcccagtgtctatgggagagtaggggcccaacttcatgaagtgcccgttagcaaatcaagatgtttaacttccctgactctactgaggcccaactcgctcccatccctactccctcattctccctttaaaatgtccagtcacccctgtacaaatcaaagttaatttcagcttatgctagactcttgcccctattacagtagcatattaccaatttaaattggtctttacccctttaactaggctttactttggcgtaagacaatctgaagcaatgagccactttttggcagcgctcttttttttttttttgacagtctcactctgtcgcccaggctggagtgcagtggtgcaatcttagctcactgcaacctctacctctgaggttcaagggattctcatgcctccctcctgagtagccagggttacgggcatgtgccatcatgcccggctagttttttgctttttttttttttttccattttagtagagatggggtttcaccatgttgactgggctggtcttgaactcctggcctcaagtgatctgcctgccttggcctcccaaagtgctgggattacaggtgtgagccaccacgcccgaccctcttcttggtagcaattaaactcccctggggaagtctcctgcttatgagatatgaagacagaagacaggaagccgcaatcccaatctcaaatatcctagactcggctttgccccaccaactttttaaatagcaagattaatccaactgtactctcaattttgcctggccaattcttcaggacccactccctcgccatctgtgaagggtttcactgggggccaattcaagacctggccacctttcaacctcacattctgctgctcatgagcccccctcacaggggcgcattcactatgagtttcagttgaagaacccagcctttgaggatctagatgcaggtttcctggtagaaagatctacatcaatgctcacaaaagccaggcaaactggtaccaaccagtcagatcagcactgtgtttggcctaatttcagctccagatggagcctcctgcaggactggtgggagttctgattctgcaacttcagcaagtggttcttgaggctggctcatcttgtgtgtgtgacgaatctccagttactaaggtaaccttcgctatcaacttctcgcactgtactttttccaaaataactccaagaggttccctcatgtgcacaaggaaatttatacaaagatattcattgcagcactgctcacagtagaaaaaaaactgaaagcaacctaaatgcccattagtagaggaatgctttaaataaactatgaaatactatgcagcagtccaaaagaacaaggcagggctgtatgtgctgatgtggatggacctccaaaacatgctgatgggtgggggaaaaaagcaagtatggtaccatttttatgttttaaaaaagaaaaaaaggggggaaaaaggactaattttatggcatcatatacatgatgcgcacatatatacatacagatatgtatatatacatatacatgcatacatgcatagaaaagcttttacaacggttgatactggccactgtggaagggaagagaatgaaatggaaggtaaacgggataacagacttttatgtaaaactttctgccccctttttaaggagaatatatgcatgtatcatttataaaatgaacaaaaaaaactttttgaaagtaaaaaagcaagtagcaaaacaatttttaaaaataatgccaaatggaatgtgcaaggccttcaagatacaatggcccggaaacaaacgagaactaaaaaaaaaaaataaaagagcaatgactttctcctgtcgatgtggcaaaatgggagcgggcgccacggagaacagaaggggaggctcggtacctttcacagcctgtctggtctgatatctcgtcccctgggaagactgaggctgctgctgctggttttgctgctgctgctgctgctgctgacgctgcatcttctgcatgtgccacttttgggaggacgtttgaaacttacttgatgagttccacacgacccgctgcacggccggggcagtctccttcggtaaaagcggcctctgctttttcactgggcttcctgtggcggcgggggccggggccgtgacggtgaccgtggaggacgtgctggtggtggctgtggcgccagccgcggaagtttgggcggaagagcgggtgagcaccggtgtttccgggggagaatggctgcccaccgtcgtggatggtggagttttacctacaactagccaatgcatgaagaaaaaacaaacaaaaaccggatttcactcaggttcacctgcacggtcttgacgccaccaagttctgggtaaaacctatgaaagccaggaatgccgaaccaattcgacgtgccaagcacaccgcgctggaggagtacattctcacctaacgctgaggccacttctgcggcgtcttccatctccgcgagcagcggcctcctttactgagcgccggcccacatctgagatacaagtcaagacctctaggggagaatgaggcaaacaagacccggctcctgcgctcaagctcccctacacctagtggacaatgcggtgggcgaacagattcaatgttcacgcccttttcgcaaagttaaaatctagtcggcaccttgagaagggcccagcggaagtcaatccagacaggaagagcaattctttggctagggaacgtagaaagcaatacctccaaagagccagatggcctcccaatggccaaagcagtaacactcagtcacccagaaagaaaagtattcttttcatctcttctgattccctccaggacaaagtttgaaggcggtactgatagccaggacaataccaggaaaacaaattctgccccaaggccagaaccttcccccaacgcaatggtactgatctaggattgagtagcattgctttggttttgattggatttattcctatcaccagcttttatgtatactgtgtgctactgttcttattgggtggtgttcaagtctaaaatgagtttatacttgcagatgcttttttcaggggaaatttttttactaaaaaaatgaggccaagcacggtggctcacgcctgtaatcccagcacttcgggaggctgaggcaggcggatcacttgaggtcaggattttgagaccagcctgaccaacatggggaaaccccgtctctattaaaaatacaaaaaaattagccagacgtggtgggaaactgaggcaggagaattccttgaacccaggaggcggaagttgcagtgagccgagatcgcgccactgcactccggtctgtgagaaagagtgagtgagactccgtctcaaaaaatattactaataggccgggcgcagtggctcacgcctgtaatcccaacactttaggaggctgaggtgggcggatcacttgtggtcaggagttcaagagcagcctggccaacatagtgaaaccccgtctctaccgaaaatacaaaaatagccgggtgcggtggcaggcgcctgtagtcccagctactcaagaggctgaggcagaagaatcgcttgaacccgggacgtggaggttgcagggagccgagaccatgccattgcactccagcctgggtgacagggtgagactccgtctcaaaataataataataataaatgaaaagtaaataaaatgagtttattttatttatttattgagatggattctcactctgtcacccagggtggagtgcagtggcacaaacttggctcactgcaacctccgccctctgagttcaagcgattctcctgcctcagcctcccgactacgtgggattacaggcgcctgccaccgcacccagctaattttttttattttcagcagagacggggtttcgccatcttgcccaggctggtcttgaactcctgacctcatgatccatccgccttggcctcctaaagtgctggaattacaggcgtgagccaacgtgcccggcctattttattttatgttttaaagagatagagttttgctatatcaccccggctgggctcaagcaagccacttcagcctcccgaatagctgggactacacgggacgtgctactgtgtcccgctttaaatgagcttaattttatttttaaagaatgagattcttggccgggtgcagtggctcacgcctgtaatcccagcactttgggaggccgaggcgggcagatcacgaagtcaggagttcgaaaccagtctggccaacatggtgaaacccc[136 bp omitted]cactccagcctgggtgacagggcgagactccgtctcaaaaaaaaaaaaaaaaaaaagattctttaaataaaaaaagtcaaaaattatacaagcaggacttgagaacgggaaagacaatgaatgtgaatgactcaagtttgaaaaacgctgccatatggagtatgtcatcttggaggagctgggctggtggggaataaagggtaggatttcaacaggcggaaagtgagaatctggagggaacagcatcagccaagatatgtctaggaatacagagcatttgagtaagtgagggcaggcagggaggaggggctggaagggaggttagagccagaagcactgagcagcacgtagaggcgatgaccacacgggagctcatttgtaaaggtggctcagttatggatgcacaggcctcagcccccggtaaggtgagcctatgccccagagaggatatctggggaacacacaccacacccaggtacaagccagcaccccgatcttggactatgctccctgacatcaaactcctttaaataaggattatgtctgcctctttttcttttcttttttttttttttttgagatggagtcttgctctgtcacccaggctggagtgcagtggcgcgatctcggctcactgcaagctccgcctcctgggttcacaccattctcctgccttagcctcccgagtagctgggactacaggtgcccgccaccatgcccagctcattttttgtattctcagtagaggcggggtttcactgtgttagccaggatggtctcaatctcctgaccttgtgatccacccgcctcggcctcccaaagtgctgggattacaggcgtgagccgctgcgcccggcctatgtctgtctttttaagatcagtattacccagaaaaagacatgagcctgattactccagcaaggattttcattcagtaagctgtgggttttaagaagccaaggagggaaagagacaagctgactatcccgacttcagagggcgttctcgatggttatcgagatgttgctggcccttgtacttccccagagaggagaatccagccaagctggtcagcaagagcctggggtgggtctggaaggagagcttcctgcagtgaagaactccgatgcttccagggccacctgccagatatggggcacagtccccgcctcttccaggtggagatgaggtgttgaactgggcccttctaagaggagggcagggggcagtgccttagcagagcttctaacccacgtaagtgccttcaatgccttcctttcctgccacattaccaaaaaatatactgttattgttgatgagctagcctgtctccccaccgtaagggcaaccgcaaaatggtcgttttctctctcctgatttgcaaaagcaaacagccagcagggcggaggggttactgctctgcagtgatcacagctggctctctgccaaataaagaactagagtatacaatccgataagattccaggctcaaaattgtttgaagttatttagatatcaaaatatttaaatttccaggaatcctgatggtttatggagacaaaatgaggctacaggaaatttcatttgtcccagaaatctggagtacataatcaatcacctgtagcgggaaaaaaagggtgaatttttttttaaagggtcagcacctgagaagctgccctatcaaattaacctacttaattcctgaatttgtcactggtcactgtttttcatttataaagcaaggactttttaagagaaaaattagcatcccctttgtagaaggatggaaattactgatgtgccagtgaaagcacagcgaagagtctaagtgtgctctctttgcttctgttctgaggttattagctataaaagctgttttgccatctgaagattcatattctacccataagctgcatccctagtggaaggtaagctggaggtcacaacagcgcaatccaaaatgcccttcacttactaaactcttaagtgaaaacacatcattgaaaagatgctctctagcggagtctgacacgagaatttttcaagacccaaaccaccatcagctctgaatttaagatcaattggttttgccccaagccttaggaagctgctctaactgaactgtgttttagaatcatcttcagcttaattgtccaccatctactaaagcttcctggagaaattcccttcagacatcaatgtgaggaaaagttctacttcttttaatcaactagaatggttttttgtttttttggaaagtatgagatcttctaaggtactgtgtttcccattctgctttcagagccaacttccctaactctgaagattgaaatagtacagatttctgtataaaacctttccccagaccacttgctattctaccttcattttccttttacatggatgtctttattttcatcttgtttcatatggttatgtatccttgtcaatctgttgcaaattctttctggaagaggtaggggcacaaaaccaatcaatcaaaagatctgttccagaaagaaagaacagtataaatatgtcactcataggagcactgccatctgcacccaaatattcctacgatcctcatgaaataaatgctactcctattgttctctgcaacaacagagacagtctctcaaaacccaatccataacatactcatatttttcagaggccatctataaatctaacagatgggtcgggatggtttgatggcctatcctccctcccttatgtaactgtatctctctcttcctccactgtacctctcacagacattctctttagctgaactgcaggaatcctctctcactctgacagctgaggttccagagcagcccaggttgaccataaccacagcagaaagattctcaaggcccatccctgacttgctttaagccaccagacaatggaaaccccaaaggacatggagttacatcttattcaagggtttcattgacaagttagctcctgatagaagttaggcacagtcaagatttaaacctggctatcccttaagtcactcgccacatacataaggttttatggctacaacctgtaatttgtcctggggcaatgtttcttctgggcccttagttaattcttcagtatctttattgagcatgttgaatcctctaacctaattgccaagccaactcaaaaatgtgctgaatactttgtcagtgggaaggacatccttccaatcattcccacaccccttttgttgggcttgttaacatgcccaggctgcactaggctgtggggtagtcactgctggttcagaatataaccgtagcctctgagactcaggggatatttggcaatatttgattgccacatttgtgactgccacaactgagcaagtaaggttgccatctggctggtagaggccagggatgctggaaaacatcctccaatacacaggactaagaattagccagggcaaactgtcagaagtgcaaggttgtgaaactctgagctaagttaaatgcaaataagattaaaagccagtaaggccagacgcagtagctcatgcctgtaatcccagcactttaggaggccgagctgggtggctcacctgaggtcaggagtttgagaccagcctggccaacatggtgaaaccctgtttctactaaaaatacaaaaattagccaggcgtggtggcaggtgcctgtaatcccagttacttgggaggctgagggaggagaatcacttgaacccgggaggcggaggttgcagtcagccgagattgtaccattgtactccagcctgggcgacaagagccaaattctgtccgccccccctccccaaaaaagccaatacacatatccaccatactccattttctagtgccctaagaagcactcagtattctggcaccaatcacccaaatactgtcctactactgtaagaaaatacacttggagatgcctaggtggcatgaggggaggaaagcaaagctgaaatcatcaaaacctttgaaatgaacactgctttttttttagagagggagtcttgctctgccacccacactggagtgcagtggcgcaatctcagctcactgcaacctccgcctcctgggttcaagcgattatcctgcctccgcctcacgagtagctgggattacaggcgcctgctaccacgccccgctaatttttgtattttagtagagacagggtttcactatgtaggtcaagctggttttgaactcctgacctcaaatgatccacccgcctcggcctccccaagtgctgggattacaggcgtgagccaccatgcccagcttgaaatgaacactcctaaccgtttgagacttgtcaaaagagaatgagatgtctgtggaatgcagcactgaaggaccatttgacaagatccaaatgttaacaaacactttggggaaataaatgagcatattggaaaagaagctgctcagactaaaaatgacttggtcactaaaagtaaccatcattttctaacagacttctctttctgtactcaaaatcaatcatactggataccgagcaggttaaaggtaggcaggcccatgtttgagtccaggtcctgttctatgactagctaggcaaccttaaaccaaacacagcttcactgtgcctctctctcagtgtgttagagggtcacataacttctgatttgtttctttaagggtcacataacttttgatagtaagtgtacgaggtaggattctaaaccaaattaagaaaactggaaacagatacaatcacttaccatcctgtttgggagatggttctttgggttccttcttattttttcgaccctcccgcccagaatggtcttctcctaaatctatgacaagttcgctctctgaatcagagtccaggcccaaatggactgttggggaatccgtctcatcttttcccttcagtttatcctttatggggtgaggtgaaggttttgccttttcggaaaagtccttctcaggctcagggctggccttgtccttgactgctccagggtctgccttctcgctggctggtgacgtgcttttcagctcctctttaatctccactgggtttgtaggcttgggcttttttttaacagcagatggctctttgtccatctgacaaccttctttgtcctctgtgtcttctggctcgttcttagacttctgctcatcatcactgatatactcactatcgctactatctgacttctcagaatcctccgaatcgctgtgctctacggccgtatagacatcttccgagatttcatttatgcctaaattcaaaaagaaaacccagcatgtggcgtagtcacaaaataaagagcaggatgaaaaatgcaaacatttttccacaccaaatgctggaataagaaaagcacgtttcaaatcgcatcacattggcctaaatggggccagtaataatctcaagtggcaactggctacggctgccaagtggtacttgccttgggagagggttttggttgttaggagacacaggacctaccaacggagattttaaatttatatggcactaaacatgtggtgccaaatttttgcaacgttgataactaattgggattattgagaatgaagagggctggaagggaacagcagggacaagctgttcaaactgatccaatttacagattagaaaacagaggcccagggatatcacctgccctaggacacaagacagaggccaggccagaaccccgggttcctggctccccaccaacactcttcccttgggtttccaaagggttaaagttcttgatcctttgtgtctaggccaaagaaaataagccaaagccttaaagcagaggttgcaaacagcccacaagccacatctagcttgcagacatgtttcatgcgagaggcactggtttggcccacagggtatcttgtctgcttttaatttataaatgtgttgtccaactcacaaatcaggaaatttcatatagaaatcaaagcaggggcttctgatgaaagagcggaaaatctagccgctctgggtcaccagcctgccaggcattggctggaacaggaaagccactggctcctctaggcgggggacacacttgtctccaggtgacccgggtgcccagccctccctcttgttccctgcactcgtggaaagtcaactgccactcggtgtgcattgctcttccactggtaaaggagtcaagagagaagtcacatacttctgtctctttcaaaaggaagaagcacaaactagcaggtgtttcatacacacaaacaaaaatgggcagaagcacatttctaacaatagttccatttaacccatttacggctcctgcccccaaccatatgttatgccatcatactgtagataataataccatatcctaaacttttagaaagaggaaagaaaacccaatcaagtctgtgcaatctcttcattctagagcaatggccactgtgaatggtgccactgtccgacttgtatacaccaaaaagaaacctgcaaaaataccagagccatgaacagcccggggcatgggggatcagctggatcattggggaatgtatctgcctccaccagggctcaatcaaaaacacaagtcgagccaggcatggtggtgcacacctgtggtcccagctactcaggaggctgaggcagaagaactgcttgaacccaggagttcaaggctagccagggcaacacaggaagaacacaagccaaaatacaaacacccagatctggtataattctgggatcctaggcttgtgctactggtaggtaatgattggaaacaagaaggaaaagtgtaagcacatatgtgataggaaaagcttgggtactgcagtccaaaggacatgaattcaaatcctgcttttctgtttttattactggtgtgaccctgaacaagttatttatctctctgagcctcagtttctctatccgcaaaatgggactgataaaagtatcaacctcccaagacaatctatatgcagtgcttagcatagtgtccaaggaaacactcagtaaatggaaataataaaattcttattagcaataaaaacaaatcaagagttgggccagctgcatggaaggacccaagaggattatttaaatggcatgccaaatttcacccatgccacccaatgtcctcaccaaacaggcaacccaacgggagctgttgtcctctggatagccccagatgggtccctaactctagctgctttctcacctgaagatgcagagcacccactgacactcagaggagcttgctctccagaggcccagccatcccccacttctttacaaatgccctcctagctttacttacttattcaacaaacattccagagcatctaccatgtgcacagaccaagtaccatagagaaggcaaatcctcataaaacggcctccctgccctcaaggagcttccagtctagattgggagggacacccccacacaaagggaccattgctacttccgagcaatgaagtaccaaaggaggagggcagatggggagggcagtcaggggagacttcctggaggaggtgagatctgagctcagcctcacagaaggcaggattcaggtaggcagtgtgaaggcaggcagcacagggaagaggaagaaaggcaacagctacagaagcagggtttgcccggtggggaggagaccagtctggagggaaagggtttcgtgtcggacacctacagaacacactcactactcgtgtggagacactgatgcgtactgaggagagcagaggcaaaactcagaggatcctcattctgcttgcaaaccttgatgattcaaacctgtatctcgagtttccagactgctttcaccaaagaataaactgatgagttcaaaaagccctgaattaactagcaagtctgaagtcttttgccatgagtggaaatatattttagctgagcaaatagttgaaagttaaagcagctgctaaaagcagccaggattcaaccttgatttcatccaggtggtatccctaccagtaatgataacaatgatactgctggaaaaaaaaaacaaaaccaaaggtatacctaattgtgctttgcaactctctatggtcttgtcaagattcagctggaacctgctacgaatctggcgcttgggagagatgagaggaacaggggtggactgttgctggaccgactcgctcagctccttcaaatccatctcagctttgcttcgatctgaaagaaaccatcacaccctcgtaagatcaggcacacaccatcctcatcacggagcttcgtccttgcaaagtcagagcaaaacacacattttagaacatgggggagggggagatactttttttgtcattcatcccaacaatatcatctgctcaaccaaatggggtgacatgaagataatggcccacgtgaacacgtttggcaggtttaaacagtccactgaacaatcgtctgggtgactttcaatatttaaaatggacaatcccagccagatggctcagtgtgtggaagtcaacatcattagggaccctccaaagacaaaggttatgggcagatattcaatctcaatttcagtgaacaaagcaacactgagcctggtcaaggtgtacttgtaacttcaggtccagattgaagaggacttgtatccaagaaagatggcgaccccctcgaaaacaccctgataattgggggccctaaatgcctatttgccacagaggcttcatttttcattctcagtggacctagtctggggtggaaactagaaagggcagggaatataagataggcagaccttccagccagtgtgttgtggctcacagcatctatgtgaggcaaggggaacagattagccctggatactcaacctctgtctaacaggtctcgctcaagtaagagtccaaggtcctcagcctagttcccaggcagaggcctctggggggtgactcaggccggaggtcctgtcccctcacttcttcgagggctctttgtaggaccagcaggacagattccaaagtcagtgagcttacatttcttggattcctctcccaccgactccagtgcccccaaaatattaagagtttcagtggctgcaaaggtccagaaagcaacaagcaactctgcaggtggggcctactgtcctccactgtgcctgccaccctctggcatcccctccaacccacccaaagcgagtgtgaggcatctgtcctactccggccgatcccaaaaaataagtcagaaagcaggtggaatccaatcaacccacaaagaggagaagccacctctgagcctgttcccaacagctatcaggttgctccctggacttcgtgcttcatctccctgctccctccatacctcaggccacctccattcattgggctgtgaaagaggccccagaatctagtctgagagctgggctggaagcactgtttaaagccatcactctctcctacctttttcctttggcctgacccaaccactttcctgttcatgcagtaagggagagttctcaaacactgcatacccagaaatcagctccttcaaagtaactagaagcagcctcccaaaagccccacccaatccactcacaggtgaccagaagcaataaattgctccaacttaattttatcagcccccaggataagattagaaagaggtcttttcccagccaggtgtggtggaatgcacctgtagtcccagctactcaggaggctgaggcaggagaatggcttgagccaggagttagtggctgtactgagctatgatcacgccactgcactctagactgggagacagagcaagactttttttttttgaaggaaaaaaaaggagggaagagatgggtcttttcctaaatcacacttacagactgcccctcccagacccagggagattccagaagtgagtgctcaaagcaagcagagacactatccctgtaattcaagaaaaatagcaaaaacagtatctgtgtgcatgcatgtgtgtgtgcacacttatcagggctttaaagacaggctactagagacaggactgcagacattcacacagccacctctgagagggtgaagaatgtgcaaatttactgcagtggggccaggcacagtgattcacacctctcccagcactttcggaggcagaggcaggaggattgcttgaggccaggagttcgagaccaggctgggcaacatagcaagacccccatctctacaaaaaatacaaaaagtagctgggcttggtggtgcacgcctgtaaacctagctacttgggaggccgaagtaggaggactgcttgagcccaggagtttgaggctgcagtgagccatgattgcgtcactgcactccagcctgggtgagcaagatcctgtctccaaaaaaaaaaaaaatttactggacaaagaactagaaaactctttatacccgtctctgtccggcaagaaatctgaagtagcttaacaaagagaaattatagggtaaaataattttaaaaataaggaatggggaacactaaaagaaaagggaggagcgcctctgcccagtcgccccaccatctgggaagcaaggagtgcatctctgcccggccgccgcaccgtctgggaagtgaggagcgcctctgccccgccccgcaccatctgggaagtgaggagcacctctgtctggccgccatgcaagcctccaggtgtaaagtggcagccttgtgtgtgatctttctgccctccccgagtttgcatttttgacactaaagtttacttttaaattaaaagtttatttaaaaaaaaaaagaaagaaagaaaagagaaatgccgggcgcagcagttcacgcctgtaatccagcactgtggaaggccaaggcgggaggatcacttgaggtcgggggttcaagatccgcctggctaacatggtgaaatcccgtctctactaaaaataaaaaaattagccaggcatggtggtgggtgcctgtaatccccggtactcaggaggctgaggcaggagaacacttgaacccaggaggcgaaggttgcagtgagcgagatcgcaccactacactccagcctgggcgacagagcaagactctgtctcaaaaaaaaaaaaaaaaaaaaaaagcccagattaaagagttccagtaggcaggactcaaggacttaacagctgagttgcatgcaaatgtgacagcaaagggggagggatttgaggcctccctcggaatttccactttcagaaatgaagaagcatgctagattccagagggaaaagccagccttttcaagaataaagatggaaacgtatactcacaaaaatactctccatggctacccaagtgacacattcatcagtgtcctcaatattcctatatactactagaatacacagttaacgaaaaaatttacaaaagagaccaacaaactttctttgtaaaagcctggagaggaccgggaacagtggctcacacttgtaatccctgcaattgggaggctgaggtgggcagttcccttgagctcacatttgagaccagcctgggcaacatggtgaaaccctgtctctactaaaaatatgaaaattagccaggcatggtggcacacgcctgtaatcccagctactcaggaggctaaggtgggaggatcgcttgagcccaggaggcagaggttgcagtgagccgagatcaggccactgcactccagactgggcaaaagagccagaccttatctcaaaaaataaaataaaagcccagagagtaaatatttcaggctttgcaggccatacaggctctgttgcaaaagcagccatgaacactacataaacagatgggtgtggatgtgttccagtaaactttatttgcaaacacaggtgggggccagatttggcctgaaagccgtaaaatctgccatcttctatactagtccagtgactgccaaccctggctgcacaccaaaattgcctgtaaagttttagaaaatcctgaggcctgagccccatcctcagagactctgactcaattggctgaggggaaggcctgggcatcagccttttacaaacttgccaggaggtcgagcgcagtggctcatgcctgtaaccccagcactttaggaggccaaagcaggtggagcacctgaggtcaggagttcaagaccaacctgaccaacatggtgaaatgccatctctactaaatatacaaaaattagccaggcatgatggcacctgcctgtaatcccagctgcttcggaagctgaggcaagagaatcacttgaacccaggaggaggagcctgcagtgagccgagatcacaccactgcactccagcctgggcaacagaatgagactccatctcaaaaaaaaaaaaaaaaaaccacaccaacaataaacttgccaggtgatcctaattggcagctaaggctgagaacccctgtatcagaccaatcttctatgtgagtaaagaaaactcactatttgccttaactcctgtgtgtgtgttaacaggacaacctttctaaaccttagggtccataaaaagagacctagacctcacctgaataactgagctctgtgtgtgcacctgcgtgtctacacgtatggctacagtaaatgcgacccattaactttagcctaaaaagactgagcactggaatgttcataatcaagaaaaatgcaaagaaggtaaattccctcattttacaaactgaggtttctctggtcagtaagctgctgttatgtttattcttgttagaataaaccaccaaatggctaggggctgggcccaggccctggaagctgaccttcaggagtttagccgaatgtaatgatctttatccaaacctgcagctgcatttgactcccccctcctccgcagagagaaaacagcttcactttctcatttagctcatgtagcttatcgggacttcttccacccctgcccttctatatcgggaatatcttcagaatccacccttgctgccaacattttgaacttttcagctgatatgaagacagcttaggctataaatggaaaccagggatgaaaaatactcacgctagagaaaaaggcacgatcttacatttctggagggagcataaatcagaaccacctctttagagggcagttgggcgatacctctcaaaatgtcgccgcatgtggcctctgatgctcaattccacttctaggaatttatcctatggattaccctcccacgtgggcaaaagggttcttcattgcagttgtcttcaatagcaaaaatggaaagaagcgtagcgtcagtaagtaaggcgcctgaataaatgttacagtttacctttaaatggaattaaatacagctgctaaaatgaaatgaaggccgatttctgtgtgttgatatgaaaagccaacctgtttcatgaaaaagcaaagactggtggagcaccttagcactgctgtaggggagccaagaaggaaatggaaaatcgctgggaaggctatatattctcagggtttctcaacagtggcactattgatatttgggtcctggataagtctttgtggtgggggtggggtggggtggaggggctgtcccgtgtgttgtaggatgttcagcagcaccctggcctctaccccctagatgctattagcacctacacaccagttgtgacaataaaaatatctccaggccaggcgcagtgcctcatgcctgcaatcccagcattttgggaggctgaggtgggcagatcactcgaggtcaggagtttgagacaagcctggccaacacggtgaaaccccgtctctactaaaaccccatctctactaaaaatacaaaaattagccggacgtagtggcgcgcgcctgtaatcccagctactcaggaggcggagtcaggcaaaggttgcggagagccagatcatgccactgcacaccagcctgggcaaacagagcgacgctccatctcaaaaaaataaataaaacataaaaatatctccagacactgccaaatgtcacctgggagacaaaaaccattcagaactcatgctatatatctagaagggctctagaaactaaaaacttgcaacagtggtgacgtgcaggaacaggggtatagagacaggtggttggaggttacagacacgctggcctttcatgaaatgtcctgtgctttgaaatttttgttaccatatgtactcattacttataaaaacaaactctataaaagaaaaatttaagaacttctttttccatttaaaaaaagagagacagggccgggcgtggtagctcacacctgtaatcccaccactttgggaagccgaggtggagatataaatatatatatccaccatatacatatacatatgcatatggtggatatatatacacaccatatacatatactcagtgtgtgtgtgtgtgtgtgtgtgtgtgtgtgtgtatatatatatatatacacaccatatacatatactcagtatatatataccatatacatatactcagtatatgtatatggtgtatgtgtgtgtgtgtatatatatatatatatataccgtgtatgtgtgtatatatatatatatatatatatatatatatatatatatatacggtatatatatatatttgtatgtgtatatatatataccgtatatatatatatttgtatgtatatatatatacacacacacacaccatatactgaggtcaggagttcgagaccagcctggccaacatggtgaaaccctatctctactaaatacaaaaaattagccgggcatggtggcgtatgcctgttatctcagctgcttgggaggctgaggcaggagaatcacccgaacccaggaggtggaggttgcagagagccgagattgtaccattgcactccagcctgggcaacaagagcaaagctctgtctcaaaaaaaaaaaagacagatttttgttctaaagctgaacgcaaactacaatggatggacttccaggaactacaaaatgtcagttccttcaagggagcaatatcacttagacaaaagaccctagctggccaggcatggtggctcatgcctgtaatcccagcactttgggaggctgaggcaggaggactgcttgaggccagaagtttgagaccagcctgggaaacatagcgagaccctgtctctatattattttttaaaaaaagagaggccgggcacagtggctcacgcctgtaatcccagcactttgggaggccgaggcgagtggatcacgaggtcaggagattgagaccatcctggctaacacagtgaaaccctgtct[133 bp omitted]cactccagcgtgggcgacagagcaagactccatctcaaaaaagagagagaccctggcagacactatctttcagtcaaagccaaacagagatcttccccacctcattcactctaaagaaaatcaagacaacatctgaaaaatctgggcccaggcactccatgtatgctctcaaagaaagcccgacttccaagataccgctttatgcacaaaaagaaaggatgcctcctgtcattaacagtggagaaataaacagaaagtctcggggtgtgacgacgttccctggccctgcctgcattttcaacagagcatcaaggcgcatttctgtcactaacaggactactgactgctgagtttcttcagctcaaagtaaacaccctctgtgaaataagaggagatgggatcatcagagaaagcaaacaggagtctggaagaagaaaaggaccgggcccacctcttctcttctagtctcagaaactcattcctatttatgacttatttataatcactgctgagtcatacagggggctcgtaataatccactgggctcagctccttgttttttagtgaggagaggaaaggccccagacagcaaatgaggggaaacagtgaattagcaacctgggcaagaaccaggtctctgtacaaaccttcccatcttataccatatagtcatataccatacacacacacaaataccatatactcatataccacatatacatatactcatatgccatatacacaaatacacatacactcaccatatacacacatacatacacacaaataccatatactcacataccatatacacatttaccatatactcatatgccatacacacacaaatatatacccatatactatatgctcaccatatacacacacgcaaatacaacacacacatacatacttatataccatacacacacatacatatactcacatatacccaatatacaaacatacccatataccatatactcatcatataccatacacacatacatatactcaaatatacccatataccatatactgtcataccatatacacacatacatatactcataccatatacccaatatacatacatataccatatacacacatacatatactaaaatgccatatacttatataccatatattcttaattatagtgtaacagtataatataattacagtatagtataaataaaaactgacaacctatggactatttttgtattgttggttgtatgtgtttgtctggcccaaatagagttttggggttttgtttttgtttttgtaccacagggtctcactctctcacccaggctggagtgcagtgatgcaatcatagctcactgcaaccttgaactcctgggctcaagcaatcctcctgcctcagcctcccaacgtgcgggaattacagacataagccaccaagcctagccagtttttgtttttaatgaaattgattgtcagcttttaaaaactaggagagttcctgtaataatctagagttctgtttttcctgacaattcagtccgacaatgtgggttaagctggcaagagccacatcctttacaaatttcaaaacttcaccttaccccctgacccccaaaaaagctgacgtatccaataggcacaggagacattcaggtatctcagctaagagctcaagctttgcagcagacaggcctgggcctgaaggccaaactctaccacaaaccatggttgatccttgggtaggtaacttgcttctctgtgccccagtttacacttctgtgaaacatagatattacctactttaaaggttgttgtaatttttaaaaagttttaatttacagacagcaaaattcacttttgggagaatacagtcctatgagtcgtaacacctgcatagattcctgtaaccaccaccacaaccaaaacacagagcaggtccatctcccgaagagttccctcccaatgtgtaggcaaaccctcctgcactccaacccccagctatcactcatctgttccccatctctgtaattctgccttttctgatatattttttaaggaaatcctgttttgttagctacaataacttcatcattatccagggtgctccctttcattgtccctgtctggggaaagtcgttccacggctgacagacagaatcaagccctataaagcatttgttcagtccctgggcagtcactggagaattccttaacattgccctgcttgttctgatctcctccccacccacggcacttccatcggtccctagctgatcctcttcccgttaggtcattgcaatcccagcccacaaaacgcccacattcccaatgctcttgttcctgctgacgaagataagaaatgtgtcctgaaccggaagagctgccaggggagacacaagagggcctcggttcccctggtgctcacccaccaccatgcccacccaccaagacacacaacaggaagaaacctttcactcccac
